(19) United States
(12) Patent Application Publication
(10) Pub. No.: US 2025/0243491 A1
(43) Pub. Date: Jul. 31, 2025

(54) PNPLA3-TARGETING SHORT INTERFERING RNA (SIRNA) MOLECULES AND USES THEREOF

(71) Applicants: Aligos Therapeutics, Inc., South San Francisco, CA (US); Merck Sharp & Dohme LLC, Rahway, NJ (US)

(72) Inventors: Leonid BEIGELMAN, South San Francisco, CA (US); Xuan LUONG, South San Francisco, CA (US); Saul MARTINEZ MONTERO, South San Francisco, CA (US); Aneerban BHATTACHARYA, South San Francisco, CA (US); Jerome DEVAL, South San Francisco, CA (US)

(73) Assignees: Aligos Therapeutics, Inc., South San Francisco, CA (US); Merck Sharp & Dohme LLC, Rahway, NJ (US)

(21) Appl. No.: 18/687,072

(22) PCT Filed: Sep. 1, 2022
(86) PCT No.: PCT/US2022/075866

§ 371 Date: Feb. 27, 2024

Related U.S. Application Data
(60) Provisional application No. 63/239,769, filed on Sep. 1, 2021.

(51) Int. Cl. C12N 15/113; A61K 45/06; A61K 47/54

(52) U.S. Cl. CPC C12N 15/1137; A61K 45/06; A61K 47/549; A61K 47/555; C12N 2310/14; C12N 2310/312; C12N 2310/316; C12N 2310/321; C12N 2310/322; C12N 2310/351

(57) ABSTRACT

Disclosed herein are short interfering RNA (siRNA) molecules that downregulate expression of PNPLA3 or variants thereof. The siRNA molecules comprise modified nucleotides and uses thereof. The siRNA molecules may be double stranded and comprise modified nucleotides, such as 2′-O-methyl nucleotides and 2′-fluoro nucleotides, and ligands.

[0001] This application claims the priority of U.S. Provisional Patent Application No. U.S. 63/239,769, entitled “PNPLA3-TARGETING SHORT INTERFERING RNA (SIRNA) MOLECULES AND USES THEREOF”, filed Sep. 1, 2021, which is incorporated herein by reference in its entirety for all purposes.

### FIELD OF THE DISCLOSURE

[0002] The present disclosure relates to certain PNPLA3-targeting short interfering ribonucleic acid (siRNA) molecules comprising modified nucleotides as well as pharmaceutical compositions comprising the siRNA molecules and uses thereof in the treatment of liver disease.

### BACKGROUND

[0003] In parallel with the global increase in obesity, nonalcoholic fatty liver disease (NAFLD) is becoming a leading cause of chronic liver disease and liver transplantation worldwide. NAFLD is a spectrum of chronic liver disorders and is believed to affect about 30% of the adult population and about 70-80% of individuals who are obese and diabetic. NAFLD is generally defined as excess liver fat accumulation greater than 5% induced by causes other than alcohol intake. In a subset of individuals, NAFLD progresses to liver inflammation (nonalcoholic steatohepatitis, NASH), which is associated with fibrosis (scarring of the liver) and may progress to cirrhosis (irreversible advanced liver scarring), which may ultimately lead to liver failure and hepatocellular carcinoma (HCC) in susceptible individuals.

[0004] In the United States alone, NASH is the third most common indication for liver transplantation and is on a trajectory to become the most common. The most important medical need in patients with NAFLD and NASH is an effective treatment to halt the progression and possibly reverse fibrosis, which is the main predictor of liver disease evolution.

[0005] Unfortunately, therapeutic options for NAFLD and NASH remain limited. The current treatment options focus on weight loss and treatment of secondary conditions, and there are currently no approved pharmaceutical treatments available. Accordingly, there exists a clinical need for improved therapies for the treatment of chronic liver disease, including NAFLD and NASH.

[0006] Patatin-like phospholipase domain-containing protein 3 (PNPLA3) is a lipid droplet-associated protein that has hydrolase activity toward triglycerides and retinyl esters. PNPLA3 has been found to be associated with fatty liver disease. Specifically, the PNPLA3 rs738409[G](I148M) variant has been found to be associated with hepatic triglyceride accumulation (steatosis), inflammation, fibrosis, cirrhosis, and hepatocellular carcinoma.

[0007] Disclosed herein are siRNA molecules that downregulate expression of PNPLA3 and its variants, pharmaceutical compositions comprising such siRNA molecules, and use of such siRNA molecules and pharmaceutical compositions thereof for treating liver disease and symptoms thereof.

### SUMMARY

[0008] One aspect of the present disclosure pertains to a double-stranded short interfering RNA (siRNA) molecule comprising a sense strand comprising a nucleotide sequence that is at least about 60%, 65%, 70%, 75%, 80%, 85%, 90%, 95%, or 100% identical to a nucleotide sequence of any one SEQ ID NOs: 3-452, 903-1484, 2068-2107, 2148-2187, 2228-2252, 2278-2301, 2326-2339 or 2354-2358; and/or an antisense strand comprising a nucleotide sequence that is at least about 60%, 65%, 70%, 75%, 80%, 85%, 90%, 95%, or 100% identical to a nucleotide sequence of any one of SEQ ID NOs: 453-902, 1485-2066, 2108-2147, 2188-2227, 2253-2277, 2302-2325 or 2340-2353, wherein the siRNA molecule downregulates expression of a Patatin-like phospholipase domain-containing protein 3 (PNPLA3) gene.

[0009] Another aspect of the present disclosure pertains to a double-stranded short interfering RNA (siRNA) molecule comprising a sense strand comprising a nucleotide sequence of any one SEQ ID NOs: 3-452, 903-1484, 2068-2107, 2148-2187, 2228-2252, 2278-2301, 2326-2339 or 2354-2358; and/or an antisense strand comprising a nucleotide sequence of any one of SEQ ID NOs: 453-902, 1485-2066, 2108-2147, 2188-2227, 2253-2277, 2302-2325 or 2340-2353, wherein the siRNA molecule downregulates expression of a Patatin-like phospholipase domain-containing protein 3 (PNPLA3) gene.

[0010] Another aspect of the present disclosure pertains to a double-stranded short interfering RNA (siRNA) molecule selected from any one of siRNA Duplex ID Nos. D1-D515 or MD1-MD673.

[0011] Another aspect of the present disclosure pertains to a pharmaceutical composition comprising any of the siRNA molecules according to the disclosure and a pharmaceutically acceptable carrier.

[0012] Another aspect of the present disclosure pertains to a method of treating a PNPLA3-associated disease in a subject in need thereof, comprising administering to the subject an amount of any of the siRNA molecules or pharmaceutical compositions according to the disclosure, thereby treating the subject. For example, the liver disease may be NAFLD and/or NASH and/or fatty liver.

[0013] Another aspect of the present disclosure pertains to a method of treating a liver disease in a subject in need thereof, comprising administering to the subject an amount of any of the siRNA molecules or pharmaceutical compositions according to the disclosure, thereby treating the subject. For example, the liver disease may be NAFLD and/or NASH and/or fatty liver.

[0014] Another aspect of the present disclosure pertains to a method of treating a liver disease in a subject in need thereof, comprising administering to the subject an amount of any of the siRNA molecules or pharmaceutical compositions according to the disclosure, further comprising administering to the subject at least one additional active agent, thereby treating the subject, wherein the at least one additional active agent is a liver disease treatment agent.

[0015] Another aspect of the present disclosure pertains to a method of reducing the expression level of PNPLA3 in a patient in need thereof comprising administering to the patient an amount of any of the siRNA molecules or pharmaceutical compositions according to the disclosure, thereby reducing the expression level of PNPLA3 in the patient.

### BRIEF DESCRIPTION OF THE DRAWINGS

[0016] FIG. 1 is a diagram of an example of a chemically modified 19-mer siRNA duplex with 2′-F modified nucleotides, 2′-O-methyl (2′-OMe) modified nucleotides, phosphorothioate internucleoside linkages, and UU overhangs.

[0017] FIG. 2 is a diagram of an example of a chemically modified 21-mer siRNA duplex with 2′-F modified nucleotides, 2′-OMe modified nucleotides, phosphorothioate internucleoside linkages, UU overhangs, and a vinyl phosphonate on the 5′ end of the antisense strand.

[0018] FIG. 3 is a diagram of an example of a chemically modified 19-mer siRNA duplex with four 2′-F modified nucleotides in the sense strand at positions 5, 7, 8, and 9; four 2′-F modified nucleotides in the antisense strand at positions 2, 6, 14, and 16; 2′-OMe modified nucleotides; phosphorothioate internucleoside linkages; a UU overhang; a blunt end; and a possible vinyl phosphonate on the 5′ end of the antisense strand.

[0019] FIG. 4 is a diagram of an example of a chemically modified 21-mer siRNA duplex with four 2′-F modified nucleotides in the sense strand at positions 7, 9, 10 and 11; four 2′-F modified nucleotides in the antisense strand at positions 2, 6, 14, and 16; 2′-OMe modified nucleotides; phosphorothioate internucleoside linkages; a UU overhang; a blunt end; and a possible vinyl phosphonate on the 5′ end of the antisense strand.

[0020] FIG. 5 is a diagram of an example of a chemically modified 21-mer siRNA duplex with six 2′-F modified nucleotides in the sense strand at positions 5, 9, 10, 11, 14 and 19; two 2′-F modified nucleotides in the antisense strand at positions 2 and 14; 2′-OMe modified nucleotides; phosphorothioate internucleoside linkages; a UU overhang; a blunt end; and a possible vinyl phosphonate on the 5′ end of the antisense strand.

[0021] FIG. 6 is a diagram of an example of a chemically modified 19-mer siRNA duplex with four 2′-F modified nucleotides in the sense strand at positions 5, 7, 8, and 9; four 2′-F modified nucleotides in the antisense strand at positions 2, 6, 14, and 16; 2′-OMe modified nucleotides; phosphorothioate internucleoside linkages; a UU overhang; a blunt end; a possible vinyl phosphonate on the 5′ end of the antisense strand; and three monomeric GalNAc4 units (“GalNAc4-ps-GalNAc4-ps GalNAc4”) at the 3′-end of the sense strand.

[0022] FIG. 7 is a diagram of an example of a chemically modified 21-mer siRNA duplex with four 2′-F modified nucleotides in the sense strand at positions 7, 9, 10 and 11; four 2′-F modified nucleotides in the antisense strand at positions 2, 6, 14, and 16; 2′-OMe modified nucleotides; phosphorothioate internucleoside linkages; a UU overhang; a blunt end; a possible vinyl phosphonate on the 5′ end of the antisense strand; and three monomeric GalNAc4 units (“GalNAc4-ps-GalNAc4-ps GalNAc4”) at the 3′-end of the sense strand.

[0023] FIG. 8 is a diagram of an example of a chemically modified 21-mer siRNA duplex with six 2′-F modified nucleotides in the sense strand at positions 5, 9, 10, 11, 14, and 19; two 2′-F modified nucleotides in the antisense strand at positions 2 and 14; 2′-OMe modified nucleotides; phosphorothioate internucleoside linkages; a UU overhang; a blunt end; a possible vinyl phosphonate on the 5′ end of the antisense strand; and three monomeric GalNAc4 units (“GalNAc4-ps-GalNAc4-ps GalNAc4”) at the 3′-end of the sense strand.

[0024] FIG. 9 shows the % of PNPLA3 RNA inhibition in hPNPLA3-KI mice transformed with modified siRNA duplexes according to the present disclosure.

[0025] FIG. 10 shows the % of PNPLA3 RNA inhibition in hPNPLA3-KI mice transformed with modified siRNA duplexes according to the present disclosure.

[0026] FIG. 11 shows the % of PNPLA3 RNA inhibition in hPNPLA3-KI mice transformed with modified siRNA duplexes according to the present disclosure.

[0027] FIG. 12 shows the % of PNPLA3 RNA inhibition in hPNPLA3-KI mice transformed with modified siRNA duplexes according to the present disclosure.

[0028] FIG. 13 shows the % of PNPLA3 RNA inhibition in hPNPLA3-KI mice transformed with modified siRNA duplexes according to the present disclosure.

[0029] FIG. 14 shows the % of PNPLA3 RNA inhibition in hPNPLA3-KI mice transformed with modified siRNA duplexes according to the present disclosure.

[0030] FIG. 15 shows the % of PNPLA3 RNA inhibition in hPNPLA3-KI mice transformed with modified siRNA duplexes according to the present disclosure.

[0031] FIG. 16 shows the % of PNPLA3 RNA inhibition in hPNPLA3-KI mice transformed with modified siRNA duplexes according to the present disclosure.

### DETAILED DESCRIPTION

[0032] This section presents a detailed description of the many different aspects and embodiments that are representative of the disclosure. This description is by way of several exemplary illustrations of varying detail and specificity. Other features and advantages of these embodiments are apparent from the additional descriptions provided herein, including the different examples. The provided examples illustrate different components and methodology useful in practicing various embodiments of the disclosure. The examples are not intended to limit the claimed disclosure. Based on the present disclosure, the ordinarily skilled artisan can identify and employ other components and methodology useful for practicing the present disclosure.

[0033] The present disclosure will be better understood with reference to the following definitions.

### Definitions

[0034] Unless defined otherwise, all technical and scientific terms used herein have the meaning commonly understood by a person of ordinary skill in the art to which this disclosure belongs.

[0035] The terms “a” and “an” as used herein mean “one or more” and include the plural unless the context is inappropriate.

[0036] The term “about” as used herein when referring to a measurable value (e.g., weight, time, and dose) is meant to encompass variations, such as ±10%, 5%, ±1%, or ±0.1% of the specified value.

[0037] Except where otherwise indicated, all numbers expressing quantities of ingredients, reaction conditions, and so forth used in the specification and claims are to be understood as being modified in all instances by the term “about,” whether or not the term “about” is present in front of the number. Accordingly, unless indicated to the contrary, the numerical parameters set forth in the following specification and attached claims are approximations that may vary depending upon the desired properties sought to be obtained by the present disclosure. At the very least, and not to be considered as an attempt to limit the application of the doctrine of equivalents to the scope of the claims, each numerical parameter should be construed in light of the number of significant digits and ordinary rounding conventions.

[0038] Additionally, the disclosure of numerical ranges within this specification is considered to be a disclosure of all numerical values and ranges within that range. For example, if a range is from about 1 to about 50, it is deemed to include, for example, 1, 50, 7, 34, 46.1, 23.7, or any other value or range within the range. Moreover, as used herein, the term “at least” includes the stated number, e.g., “at least 50” includes 50.

[0039] As a general matter, compositions specifying a percentage are specifying a percentage by weight unless otherwise specified. Further, if a variable is not accompanied by a definition, then the previous definition of the variable controls.

[0040] The term “including” is used herein to mean, and is used interchangeably with, the phrase “including, but not limited to”.

[0041] As used herein, the terms “siRNA” and “siRNA molecule” and “siNA” are used interchangeably and refer to short (or small) interfering ribonucleic acid (RNA), including chemically modified RNA, which may be single-stranded or double-stranded. As used herein, the siRNA may comprise modified nucleotides, including modifications at the sugar, nucleobase, and/or phosphodiester backbone (internucleoside linkage), and nucleoside analogs, as well as conjugates or ligands. As used herein, the term “siRNA duplex” refers to a double-stranded (“ds”) siRNA or “dsRNA” or “ds-NA” having a sense strand and an antisense strand.

[0042] As used herein, the term “antisense strand” or “guide strand” refers to the strand of a siRNA molecule which includes a region that is substantially complementary to a target sequence, e.g., a PNPLA3 mRNA.

[0043] As used herein, the term “sense strand” or “passenger strand” refers to the strand of a siRNA molecule that includes a region that is substantially complementary to a region of the antisense strand as that term is defined herein.

[0044] As used herein, the term “modified nucleotide” refers to a nucleotide having, independently, modifications at the sugar, nucleobase, and/or phosphodiester backbone (internucleoside linkage), and nucleoside analogs. Thus, the term modified nucleotide encompasses substitutions, additions, or removal of, e.g., a functional group or atom, to internucleoside linkages, sugar moieties, or nucleobases. The modifications suitable for use in the siRNAs of the disclosure include all types of modifications disclosed herein or known in the art. Any such modifications, as used in a siRNA molecule, are encompassed by “siRNA” and “siRNA molecule” and “siRNA duplex” for the purposes of this specification and claims. It will also be understood that the term “nucleotide” can also refer to a modified nucleotide, as further detailed herein.

[0045] As used herein, the term “nucleobase” refers to naturally-occurring nucleobases and their analogues. Examples of naturally-occurring nucleobases or their analogues include, but are not limited to, thymine, uracil, adenine, cytosine, guanine, aryl, heteroaryl, and an analogue or derivative thereof.

[0046] As used herein, the term “nucleotide overhang” or “overhang” refers to at least one unpaired nucleotide that protrudes from the duplex structure of a double-stranded RNA (e.g., siRNA duplex or dsRNA). For example, when a 3′ end of one strand of a dsRNA extends beyond the 5′ end of the other strand, or vice versa, there is a nucleotide overhang. The overhang(s) can be on the sense strand, the antisense strand or any combination thereof. Furthermore, the nucleotide(s) of an overhang can be present on the 5′ end, 3′ end or both ends of an antisense and/or sense strand of a dsRNA and can comprise modified nucleotides. Generally, if any nucleotide overhangs, as defined herein, are present, the sequence of such overhangs is not considered in determining the degree of complementarity between two sequences and such overhangs shall not be regarded as mismatches with regard to the determination of complementarity. By way of example, a sense strand of 21 nucleotides in length and an antisense strand of 21 nucleotides in length that hybridizes to form a 19 base pair duplex region with a 2 nucleotide overhang at the 3′ end of each strand would be considered to be fully complementary as the term is used herein.

[0047] As used herein, the term “blunt end” refers to an end of a dsRNA with no unpaired nucleotides, i.e., no nucleotide overhang. In some embodiments, a blunt end can be present on one or both ends of a dsRNA.

[0048] The terms “complementary,” “fully complementary” and “substantially complementary” herein can be used with respect to the base pairing between the sense strand and the antisense strand of a duplex siRNA or dsRNA, or between the antisense strand of a siRNA and a target sequence, as will be understood from the context of their use. As used herein, a first sequence is “complementary” to a second sequence if a polynucleotide comprising the first sequence can hybridize to a polynucleotide comprising the second sequence to form a duplex region under certain conditions, such as physiological conditions. Other such conditions can include moderate or stringent hybridization conditions, which are known to those of ordinary skill in the art. A first sequence is considered to be fully complementary (100% complementary) to a second sequence if a polynucleotide comprising the first sequence base pairs with a polynucleotide comprising the second sequence over the entire length of one or both nucleotide sequences without any mismatches. In some embodiments, a sequence is “substantially complementary” to a target sequence if the sequence is at least about 80%, 85%, 90%, 95%, 96%, 97%, 98%, 99% or 100% complementary to a target sequence. Percent complementarity can be calculated, for example, by dividing the number of bases in a first sequence that are complementary to bases at corresponding positions in a second or target sequence by the total length of the first sequence. Such calculations are well within the ability of those ordinarily skilled in the art. A sequence may also be said to be substantially complementary to another sequence if there are no more than 5, 4, 3, 2, or 1 mismatches over a 30 base pair duplex region, for example, when the two sequences are hybridized. “Complementary” sequences, as used herein, can also include, or be formed entirely from, non-Watson-Crick base pairs and/or base pairs formed from modified nucleotides, in so far as the above requirements with respect to their ability to hybridize are fulfilled.

[0049] The use of percent identity (i.e., “identical”) is a common way of defining the number of differences in the nucleobases between two nucleic acid sequences. For example, where a first sequence is ACGT, a second sequence of ACGA would be considered a “non-identical” sequence with one difference. Percent identity may be calculated over the entire length of a sequence, or over a portion of the sequence. Percent identity may be calculated according to the number of nucleobases that have identical base pairing corresponding to the sequence to which it is being compared. The non-identical nucleobases may be adjacent to each other, dispersed throughout the sequence, or both. Such calculations are well within the ability of those ordinarily skilled in the art.

[0050] As used herein, “missense mutation” refers to when a change in a single base pair results in a substitution of a different amino acid in the resulting protein.

[0051] As used herein, the term “effective amount” or “therapeutically effective amount” refers to the amount of a siRNA of the present disclosure sufficient to effect beneficial or desired results, such as for example, the amount that will elicit the biological or medical response of a tissue, system, animal, or human that is being sought by a researcher, veterinarian, medical doctor, or other clinician. A therapeutically effective amount can be administered in one or more administrations, applications, or dosages and is not intended to be limited to a particular formulation or administration route. In some embodiments, “therapeutically effective amount” means an amount that alleviates at least one clinical symptom in a human patient, e.g., at least one symptom of a PNPLA3-associated disease or a liver disease.

[0052] As used herein, the terms “patient” and “subject” refer to organisms who use the siRNA molecules of the disclosure for the prevention or treatment of a medical condition, including in the methods of the present disclosure. Such organisms are preferably mammals, and more preferably humans. As used herein, a subject “in need” of treatment of an existing condition or of prophylactic treatment encompasses both a determination of need by a medical professional as well as the desire of a patient for such treatment. Administering of the compound (e.g., a siRNA of the present disclosure) to the subject includes both self-administration and administration to the patient by another.

[0053] As used herein, the term “active agent” or “active ingredient” or “therapeutic agent” refers to an ingredient with a pharmacological effect, such as a therapeutic effect, at a relevant dose. This includes siRNA molecules according to the disclosure.

[0054] As used herein, a “liver disease treatment agent” is an active agent which can be used to treat liver disease, either alone or in combination with another active agent, and is other than the siRNA of the present disclosure.

[0055] As used herein, the term “pharmaceutical composition” refers to the combination of at least one active agent with a carrier, inert or active, making the composition especially suitable for diagnostic or therapeutic use in vivo or ex vivo. In some embodiments, the term “pharmaceutical composition” means a composition comprising a siRNA molecule as described herein and at least one additional component selected from pharmaceutically acceptable carriers, diluents, adjuvants, excipients, or vehicles, such as preserving agents, fillers, disintegrating agents, wetting agents, emulsifying agents, suspending agents, sweetening agents, flavoring agents, perfuming agents, antibacterial agents, antifungal agents, lubricating agents and dispensing agents, depending on the mode of administration and dosage form used.

[0056] As used herein, the term “pharmaceutically acceptable carrier” refers to any pharmaceutical carrier, diluent, adjuvant, excipient, or vehicle, including those described herein, for example, solvents, buffers, solutions (e.g., a phosphate buffered saline solution), water, emulsions (e.g., such as an oil/water or water/oil emulsions), various types of wetting agents, stabilizers, preservatives, antibacterial and antifungal agents, dispersion media, coatings, isotonic and absorption delaying agents and the like acceptable for use in formulating pharmaceuticals, including, for example, pharmaceuticals suitable for administration to humans. For examples of carriers, see, for example, Martin, Remington's Pharmaceutical Sciences, 15th Ed., Mack Publ. Co., Easton, PA [1975].

[0057] As used herein, the terms “treat”, “treating”, and “treatment” include any effect, e.g., lessening, reducing, modulating, ameliorating or eliminating, that results in the improvement of the condition, disease, disorder, and the like; or of one or more symptoms associated with the condition, disease, or disorder; or of the cause(s) of the condition, disease, or disorder. For example, with respect to PNPLA-associated disease, the terms “treat”, “treating”, and “treatment” include, but are not limited to, alleviation or amelioration of one or more symptoms associated with PNPLA3 gene expression and/or PNPLA3 protein production, e.g., the presence of increased protein activity in the hedgehog (Hh) signaling pathway, fatty liver (steatosis), nonalcoholic steatohepatitis (NASH), cirrhosis of the liver, accumulation of fat in the liver, inflammation of the liver, hepatocellular necrosis, liver fibrosis, obesity, or nonalcoholic fatty liver disease (NAFLD). “Treatment” can also mean prolonging survival as compared to expected survival in the absence of treatment.

[0058] As used herein, the terms “alleviate” and “alleviating” refer to reducing the severity of the condition and/or a symptom thereof, such as reducing the severity by, for example, at least 10%, 20%, 30%, 40%, 50%, 60%, 70%, 80%, 90%, or 95%.

[0059] As used herein, the term “downregulate” or “downregulating” is used interchangeably with “reducing”, “inhibiting”, or “suppressing” or other similar terms, and includes any level of downregulation.

[0060] As used herein, the term “PNPLA3 gene” refers to the Patatin-like phospholipase domain-containing protein 3 gene and includes variants thereof. The sequence for the human wild-type PNPLA3 gene may be found in, for example, NCBI Ref. No. NM_025225.3 and SEQ ID NO: 1. Additional examples of PNPLA3 gene sequences, including for other mammalian genes, are readily available using public databases, including, for example, NCBI RefSeq, GenBank, UniProt, and OMIM.

[0061] Throughout the description, where compositions are described as having, including, or comprising specific components, or where processes and methods are described as having, including, or comprising specific steps, it is contemplated that, additionally, there are compositions of the present disclosure that consist essentially of, or consist of, the recited components, and that there are processes and methods according to the present disclosure that consist essentially of, or consist of, the recited processing steps.

siRNA Molecules

[0062] Disclosed herein are double-stranded short (or small) interfering RNA (siRNA) molecules that specifically downregulate expression of a Patatin-like phospholipase domain-containing protein 3 (PNPLA3) gene.

[0063] In some embodiments, the double-stranded siRNA molecule comprises (a) a sense strand comprising a nucleotide sequence that is at least about 60%, 65%, 70%, 75%, 80%, 85%, 90%, 95%, or 100% identical to the nucleotide sequence of any one of SEQ ID NOs: 3-452, 903-1484, 2068-2107, 2148-2187, 2228-2252, 2278-2301, 2326-2339 or 2354-2358; and/or (b) an antisense strand comprising a nucleotide sequence that is at least about 60%, 65%, 70%, 75%, 80%, 85%, 90%, 95%, or 100% identical to the nucleotide sequence of any one of SEQ ID NOs: 453-902, 1485-2066, 2108-2147, 2188-2227, 2253-2277, 2302-2325 or 2340-2353.

[0064] In some embodiments, the double-stranded siRNA molecule comprises (a) a sense strand comprising a nucleotide sequence of any one SEQ ID NOs: 3-452, 903-1484, 2068-2107, 2148-2187, 2228-2252, 2278-2301, 2326-2339 or 2354-2358; and/or (b) an antisense strand comprising a nucleotide sequence of any one of SEQ ID NOs: 453-902, 1485-2066, 2108-2147, 2188-2227, 2253-2277, 2302-2325 or 2340-2353.

[0065] In some embodiments, the double-stranded siRNA molecule comprises a sense strand comprising a nucleotide sequence of any one of SEQ ID NOs: 3-452. In some embodiments, the siRNA molecule comprises an antisense strand comprising a nucleotide sequence of any one of SEQ ID NOs: 453-902. In some embodiments, the siRNA molecule comprises (a) a sense strand comprising a nucleotide sequence of any one of SEQ ID NOs: 3-452 and (b) an antisense strand comprising a nucleotide sequence of any one of SEQ ID NOs: 453-902.

[0066] In some embodiments, the double-stranded siRNA molecule comprises a sense strand comprising a nucleotide sequence of any one of SEQ ID NOs: 903-1484. In some embodiments, the siRNA molecule comprises an antisense strand comprising a nucleotide sequence of any one of SEQ ID NOs: 1485-2066. In some embodiments, the siRNA molecule comprises (a) a sense strand comprising a nucleotide sequence of any one of SEQ ID NOs: 903-1484 and (b) an antisense strand comprising a nucleotide sequence of any one of SEQ ID NOs: 1485-2066.

[0067] In some embodiments, the double-stranded siRNA molecule comprises a sense strand comprising a nucleotide sequence of any one of SEQ ID NOs: 2068-2107. In some embodiments, the siRNA molecule comprises an antisense strand comprising a nucleotide sequence of any one of SEQ ID NOs: 2108-2147. In some embodiments, the siRNA molecule comprises (a) a sense strand comprising a nucleotide sequence of any one of SEQ ID NOs: 2068-2107 and (b) an antisense strand comprising a nucleotide sequence of any one of SEQ ID NOs: 2108-2147.

[0068] In some embodiments, the double-stranded siRNA molecule comprises a sense strand comprising a nucleotide sequence of any one of SEQ ID NOs: 2148-2187. In some embodiments, the siRNA molecule comprises an antisense strand comprising a nucleotide sequence of any one of SEQ ID NOs: 2188-2227. In some embodiments, the siRNA molecule comprises (a) a sense strand comprising a nucleotide sequence of any one of SEQ ID NOs: 2148-2187 and (b) an antisense strand comprising a nucleotide sequence of any one of SEQ ID NOs: 2188-2227.

[0069] In some embodiments, the double-stranded siRNA molecule comprises a sense strand comprising a nucleotide sequence of any one of SEQ ID NOs: 2228-2252. In some embodiments, the siRNA molecule comprises an antisense strand comprising a nucleotide sequence of any one of SEQ ID NOs: 2253-2277. In some embodiments, the siRNA molecule comprises (a) a sense strand comprising a nucleotide sequence of any one of SEQ ID NOs: 2228-2252 and (b) an antisense strand comprising a nucleotide sequence of any one of SEQ ID NOs: 2253-2277.

[0070] In some embodiments, the double-stranded siRNA molecule comprises a sense strand comprising a nucleotide sequence of any one of SEQ ID NOs: 2278-2301, 2326-2339 or 2354-2358. In some embodiments, the siRNA molecule comprises an antisense strand comprising a nucleotide sequence of any one of SEQ ID NOs: 2302-2325 or 2340-2353. In some embodiments, the siRNA molecule comprises (a) a sense strand comprising a nucleotide sequence of any one of SEQ ID NOs: 2278-2301, 2326-2339 or 2354-2358 and (b) an antisense strand comprising a nucleotide sequence of any one of SEQ ID NOs: 2302-2325 or 2340-2353.

[0071] In some embodiments, the double-stranded siRNA molecule comprises (a) a sense strand comprising at least about 15, 16, 17, 18, 19, 20, or 21 consecutive nucleotides of the nucleotide sequence of any one SEQ ID NOs: 3-452, 903-1484, 2068-2107, 2148-2187, 2228-2252, 2278-2301, 2326-2339 or 2354-2358; and/or (b) an antisense strand comprising at least about 15, 16, 17, 18, 19, 20, 21, 22, or 23 consecutive nucleotides of the nucleotide sequence of any one of SEQ ID NOs: 453-902, 1485-2066, 2108-2147, 2188-2227, 2253-2277, 2302-2325 or 2340-2353.

[0072] In some embodiments, the double-stranded siRNA molecule comprises (a) a sense strand comprising a nucleotide sequence having at least about 15, 16, 17, 18, 19, 20, or 21 consecutive nucleotides of the nucleotide sequence of any one of SEQ ID NOs: 3-452, 903-1484, 2068-2107, 2148-2187, 2228-2252, 2278-2301, 2326-2339 or 2354-2358; and/or (b) an antisense strand comprising a nucleotide sequence having at least about 15, 16, 17, 18, 19, 20, 21, 22, or 23 consecutive nucleotides of the nucleotide sequence of any one of SEQ ID NOs: 453-902, 1485-2066, 2108-2147, 2188-2227, 2253-2277, 2302-2325 or 2340-2353.

[0073] In some embodiments, at least one end of the double-stranded siRNA molecule is a blunt end. In some embodiments, both ends of the double-stranded siRNA molecule are blunt ends. In some embodiments, one end of the double-stranded siRNA molecule comprises a blunt end and one end of the double-stranded siRNA molecule comprises an overhang.

[0074] In some embodiments, at least one end of the siRNA molecule comprises an overhang, wherein the overhang comprises at least one unpaired nucleotide. In some embodiments, at least one end of the siRNA molecule comprises an overhang, wherein the overhang comprises at least two unpaired nucleotides. In some embodiments, both ends of the siRNA molecule comprise an overhang, wherein the overhang comprises at least one unpaired nucleotide. In some embodiments, both ends of the siRNA molecule comprise an overhang, wherein the overhang comprises at least two unpaired nucleotides. In some embodiments, the siRNA molecule comprises an overhang of two unpaired nucleotides at the 3′ end of the sense strand. In some embodiments, the siRNA molecule comprises an overhang of two unpaired nucleotides at the 3′ end of the antisense strand. In some embodiments, the siRNA molecule comprises an overhang of two unpaired nucleotides at the 3′ end of the sense strand and the 3′ end of the antisense strand.

[0075] In some embodiments, the double stranded siRNA molecule is selected from any one of siRNA Duplex ID Nos. D1-D515 or MD1-MD-687. In some embodiments, the double stranded siRNA molecule is selected from any one of siRNA Duplex ID Nos. D1-D515. In some embodiments, the double stranded siRNA molecule is selected from any one of siRNA Duplex ID Nos. MD1-MD687.

[0076] In some embodiments, the double stranded siRNA molecule is selected from any one of the siRNA Duplexes of Table 1 or Table 1A or Table 2. In some embodiments, the double stranded siRNA molecule is selected from any one of the siRNA Duplexes of Table 1. In some embodiments, the double stranded siRNA molecule is selected from any one of the siRNA Duplexes of Table 1A. In some embodiments, the double stranded siRNA molecule is selected from any one of the siRNA Duplexes of Table 2.

[0077] In some embodiments, the double stranded siRNA molecule is about 17 to about 29 base pairs in length, or from 19-23 base pairs, or from 19-21 base pairs, one strand of which is complementary to a target mRNA, that when added to a cell having the target mRNA, or produced in the cell in vivo, causes degradation of the target mRNA.

[0078] In some embodiments, the siRNA molecules of the disclosure comprise a nucleotide sequence that is complementary to a nucleotide sequence of a target gene. In some embodiments, the siRNA molecule of the disclosure interacts with a nucleotide sequence of a target gene in a manner that causes inhibition of expression of the target gene.

[0079] The siRNA molecules can be obtained using any one of a number of techniques known to those of ordinary skill in the art. In some embodiments, the siRNA molecules may be synthesized as two separate, complementary nucleic acid molecules, or as a single nucleic acid molecule with two complementary regions. For example, the siRNAs of the disclosure may be chemically synthesized using appropriately protected ribonucleoside phosphoramidites and a conventional RNA synthesizer or other well-known methods. In addition, the siRNAs may be produced by a commercial supplier, such as, for example, Dharmacon/Horizon (Lafayette, Colo., USA), Glen Research (Sterling, Va., USA), ChemGenes (Ashland, Mass., USA) and Cruachem (Glasgow, UK). In some embodiments, the siRNA molecules may be encoded by a plasmid.

### Sense Strand

[0080] Any of the siRNA molecules described herein may comprise a sense strand. In some embodiments, the sense strand comprises between about 15 to about 50 nucleotides. In some embodiments, the sense strand comprises between about 15 to about 45 nucleotides. In some embodiments, the sense strand comprises between about 15 to about 40 nucleotides. In some embodiments, the sense strand comprises between about 15 to about 35 nucleotides. In some embodiments, the sense strand comprises between about 15 to about 30 nucleotides. In some embodiments, the sense strand comprises between about 15 to about 25 nucleotides. In some embodiments, the sense strand comprises between about 17 to about 23 nucleotides. In some embodiments, the sense strand comprises between about 17 to about 22 nucleotides. In some embodiments, the sense strand comprises between about 17 to about 21 nucleotides. In some embodiments, the sense strand comprises between about 18 to about 23 nucleotides. In some embodiments, the sense strand comprises between about 18 to about 22 nucleotides. In some embodiments, the sense strand comprises between about 18 to about 21 nucleotides. In some embodiments, the sense strand comprises between about 19 to about 23 nucleotides. In some embodiments, the sense strand comprises between about 19 to about 22 nucleotides. In some embodiments, the sense strand comprises between about 19 to about 21 nucleotides.

[0081] In some embodiments, the sense strand comprises at least about 15, 16, 17, 18, 19, 20, 21, 22, 23, 24, 25, 26, 27, 28, 29, or 30 or more nucleotides. In some embodiments, the sense strand comprises at least about 15 nucleotides. In some embodiments, the sense strand comprises at least about 16 nucleotides. In some embodiments, the sense strand comprises at least about 17 nucleotides. In some embodiments, the sense strand comprises at least about 18 nucleotides. In some embodiments, the sense strand comprises at least about 19 nucleotides. In some embodiments, the sense strand comprises at least about 20 nucleotides. In some embodiments, the sense strand comprises at least about 21 nucleotides. In some embodiments, the sense strand comprises at least about 22 nucleotides. In some embodiments, the sense strand comprises at least about 23 nucleotides.

[0082] In some embodiments, the sense strand comprises less than about 50, 45, 40, 35, 30, 29, 28, 27, 26, 25, 24, 23, 22, 21, 20, or 19 or fewer nucleotides. In some embodiments, the sense strand comprises less than about 30 nucleotides. In some embodiments, the sense strand comprises less than about 25 nucleotides. In some embodiments, the sense strand comprises less than about 24 nucleotides. In some embodiments, the sense strand comprises less than about 23 nucleotides. In some embodiments, the sense strand comprises less than about 22 nucleotides. In some embodiments, the sense strand comprises less than about 21 nucleotides. In some embodiments, the sense strand comprises less than about 20 nucleotides. In some embodiments, the sense strand comprises less than about 19 nucleotides.

[0083] In some embodiments, the sense strand comprises a sequence that is at least about 60%, 65%, 70%, 75%, 80%, 85%, 90%, 95%, or 100% identical to a fragment of the PNPLA3 gene across the entire length of the sense strand. In some embodiments, the sense strand comprises a sequence that is at least about 70% identical to a fragment of the PNPLA3 gene across the entire length of the sense strand. In some embodiments, the sense strand comprises a sequence that is at least about 75% identical to a fragment of the PNPLA3 gene across the entire length of the sense strand. In some embodiments, the sense strand comprises a sequence that is at least about 80% identical to a fragment of the PNPLA3 gene across the entire length of the sense strand. In some embodiments, the sense strand comprises a sequence that is at least about 85% identical to a fragment of the PNPLA3 gene across the entire length of the sense strand. In some embodiments, the sense strand comprises a sequence that is at least about 90% identical to a fragment of the PNPLA3 gene across the entire length of the sense strand. In some embodiments, the sense strand comprises a sequence that is at least about 95% identical to a fragment of the PNPLA3 gene across the entire length of the sense strand. In some embodiments, the sense strand comprises a sequence that is about 100% identical to a fragment of the PNPLA3 gene across the entire length of the sense strand. In some embodiments, the fragment of the PNPLA3 gene consists of about 15, 16, 17, 18, 19, 20, 21, 22, 23, 24, 25, 26, 27, 28, 29, or 30 consecutive nucleotides of the PNPLA3 gene. In some embodiments, the fragment of the PNPLA3 gene consists of about 15 consecutive nucleotides of the PNPLA3 gene. In some embodiments, the fragment of the PNPLA3 gene consists of about 16 consecutive nucleotides of the PNPLA3 gene. In some embodiments, the fragment of the PNPLA3 gene consists of about 17 consecutive nucleotides of the PNPLA3 gene. In some embodiments, the fragment of the PNPLA3 gene consists of about 18 consecutive nucleotides of the PNPLA3 gene. In some embodiments, the fragment of the PNPLA3 gene consists of about 19 consecutive nucleotides of the PNPLA3 gene. In some embodiments, the fragment of the PNPLA3 gene consists of about 20 consecutive nucleotides of the PNPLA3 gene. In some embodiments, the fragment of the PNPLA3 gene consists of about 21 consecutive nucleotides of the PNPLA3 gene. In some embodiments, the fragment of the PNPLA3 gene consists of about 22 consecutive nucleotides of the PNPLA3 gene. In some embodiments, the fragment of the PNPLA3 gene consists of about 23 consecutive nucleotides of the PNPLA3 gene.

[0084] In some embodiments, the sense strand comprises a sequence having between about 15 to about 50 consecutive nucleotides of a fragment of the PNPLA3 gene. In some embodiments, the sense strand comprises a sequence having between about 15 to about 45 consecutive nucleotides of a fragment of the PNPLA3 gene. In some embodiments, the sense strand comprises a sequence having between about 15 to about 40 consecutive nucleotides of a fragment of the PNPLA3 gene. In some embodiments, the sense strand comprises a sequence having between about 15 to about 35 consecutive nucleotides of a fragment of the PNPLA3 gene. In some embodiments, the sense strand comprises a sequence having between about 15 to about 30 consecutive nucleotides of a fragment of the PNPLA3 gene. In some embodiments, the sense strand comprises a sequence having between about 15 to about 25 consecutive nucleotides of a fragment of the PNPLA3 gene. In some embodiments, the sense strand comprises between about 17 to about 23 consecutive nucleotides of a fragment of the PNPLA3 gene. In some embodiments, the sense strand comprises between about 17 to about 22 consecutive nucleotides of a fragment of the PNPLA3 gene. In some embodiments, the sense strand comprises between about 17 to about 21 consecutive nucleotides of a fragment of the PNPLA3 gene. In some embodiments, the sense strand comprises between about 18 to about 23 consecutive nucleotides of a fragment of the PNPLA3 gene. In some embodiments, the sense strand comprises between about 18 to about 22 consecutive nucleotides of a fragment of the PNPLA3 gene. In some embodiments, the sense strand comprises between about 18 to about 21 consecutive nucleotides of a fragment of the PNPLA3 gene. In some embodiments, the sense strand comprises between about 19 to about 23 consecutive nucleotides of a fragment of the PNPLA3 gene. In some embodiments, the sense strand comprises between about 19 to about 22 consecutive nucleotides of a fragment of the PNPLA3 gene. In some embodiments, the sense strand comprises between about 19 to about 21 consecutive nucleotides of a fragment of the PNPLA3 gene. In some embodiments, the fragment of the PNPLA3 gene consists of about 15, 16, 17, 18, 19, 20, 21, 22, 23, 24, 25, 26, 27, 28, 29, or 30 consecutive nucleotides of the PNPLA3 gene. In some embodiments, the fragment of the PNPLA3 gene consists of about 15 consecutive nucleotides of the PNPLA3 gene. In some embodiments, the fragment of the PNPLA3 gene consists of about 16 consecutive nucleotides of the PNPLA3 gene. In some embodiments, the fragment of the PNPLA3 gene consists of about 17 consecutive nucleotides of the PNPLA3 gene. In some embodiments, the fragment of the PNPLA3 gene consists of about 18 consecutive nucleotides of the PNPLA3 gene. In some embodiments, the fragment of the PNPLA3 gene consists of about 19 consecutive nucleotides of the PNPLA3 gene. In some embodiments, the fragment of the PNPLA3 gene consists of about 20 consecutive nucleotides of the PNPLA3 gene. In some embodiments, the fragment of the PNPLA3 gene consists of about 21 consecutive nucleotides of the PNPLA3 gene. In some embodiments, the fragment of the PNPLA3 gene consists of about 22 consecutive nucleotides of the PNPLA3 gene. In some embodiments, the fragment of the PNPLA3 gene consists of about 23 consecutive nucleotides of the PNPLA3 gene.

[0085] In some embodiments, the sense strand comprises a sequence having at least about 15, 16, 17, 18, 19, 20, 21, 22, 23, 24, 25, 26, 27, 28, 29, or 30 or more consecutive nucleotides of a fragment of the PNPLA3 gene. In some embodiments, the sense strand comprises a sequence having at least about 15 consecutive nucleotides of a fragment of the PNPLA3 gene. In some embodiments, the sense strand comprises a sequence having at least about 16 consecutive nucleotides of a fragment of the PNPLA3 gene. In some embodiments, the sense strand comprises a sequence having at least about 17 consecutive nucleotides of a fragment of the PNPLA3 gene. In some embodiments, the sense strand comprises a sequence having at least about 18 consecutive nucleotides of a fragment of the PNPLA3 gene. In some embodiments, the sense strand comprises a sequence having at least about 19 consecutive nucleotides of a fragment of the PNPLA3 gene. In some embodiments, the sense strand comprises a sequence having at least about 20 consecutive nucleotides of a fragment of the PNPLA3 gene. In some embodiments, the sense strand comprises a sequence having at least about 21 consecutive nucleotides of a fragment of the PNPLA3 gene. In some embodiments, the sense strand comprises a sequence having at least about 22 consecutive nucleotides of a fragment of the PNPLA3 gene. In some embodiments, the sense strand comprises a sequence having at least about 23 consecutive nucleotides of a fragment of the PNPLA3 gene. In some embodiments, the fragment of the PNPLA3 gene consists of about 15, 16, 17, 18, 19, 20, 21, 22, 23, 24, 25, 26, 27, 28, 29, or 30 consecutive nucleotides of the PNPLA3 gene. In some embodiments, the fragment of the PNPLA3 gene consists of about 15 consecutive nucleotides of the PNPLA3 gene. In some embodiments, the fragment of the PNPLA3 gene consists of about 16 consecutive nucleotides of the PNPLA3 gene. In some embodiments, the fragment of the PNPLA3 gene consists of about 17 consecutive nucleotides of the PNPLA3 gene. In some embodiments, the fragment of the PNPLA3 gene consists of about 18 consecutive nucleotides of the PNPLA3 gene. In some embodiments, the fragment of the PNPLA3 gene consists of about 19 consecutive nucleotides of the PNPLA3 gene. In some embodiments, the fragment of the PNPLA3 gene consists of about 20 consecutive nucleotides of the PNPLA3 gene. In some embodiments, the fragment of the PNPLA3 gene consists of about 21 consecutive nucleotides of the PNPLA3 gene. In some embodiments, the fragment of the PNPLA3 gene consists of about 22 consecutive nucleotides of the PNPLA3 gene. In some embodiments, the fragment of the PNPLA3 gene consists of about 23 consecutive nucleotides of the PNPLA3 gene.

[0086] In some embodiments, the sense strand comprises a sequence having less than about 50, 45, 40, 35, 30, 29, 28, 27, 26, 25, 24, 23, 22, 21, 20, or 19 or fewer consecutive nucleotides of a fragment of the PNPLA3 gene. In some embodiments, the sense strand comprises a sequence having less than about 35 consecutive nucleotides of a fragment of the PNPLA3 gene. In some embodiments, the sense strand comprises a sequence having less than about 30 consecutive nucleotides of a fragment of the PNPLA3 gene. In some embodiments, the sense strand comprises a sequence having less than about 25 consecutive nucleotides of a fragment of the PNPLA3 gene. In some embodiments, the sense strand comprises a sequence having less than about 24 consecutive nucleotides of a fragment of the PNPLA3 gene. In some embodiments, the sense strand comprises a sequence having less than about 23 consecutive nucleotides of a fragment of the PNPLA3 gene. In some embodiments, the sense strand comprises a sequence having less than about 22 consecutive nucleotides of a fragment of the PNPLA3 gene. In some embodiments, the sense strand comprises a sequence having less than about 21 consecutive nucleotides of a fragment of the PNPLA3 gene. In some embodiments, the sense strand comprises a sequence having less than about 20 consecutive nucleotides of a fragment of the PNPLA3 gene. In some embodiments, the sense strand comprises a sequence having less than about 19 consecutive nucleotides of a fragment of the PNPLA3 gene. In some embodiments, the fragment of the PNPLA3 gene consists of about 15, 16, 17, 18, 19, 20, 21, 22, 23, 24, 25, 26, 27, 28, 29, or 30 consecutive nucleotides of the PNPLA3 gene. In some embodiments, the fragment of the PNPLA3 gene consists of about 15 consecutive nucleotides of the PNPLA3 gene. In some embodiments, the fragment of the PNPLA3 gene consists of about 16 consecutive nucleotides of the PNPLA3 gene. In some embodiments, the fragment of the PNPLA3 gene consists of about 17 consecutive nucleotides of the PNPLA3 gene. In some embodiments, the fragment of the PNPLA3 gene consists of about 18 consecutive nucleotides of the PNPLA3 gene. In some embodiments, the fragment of the PNPLA3 gene consists of about 19 consecutive nucleotides of the PNPLA3 gene. In some embodiments, the fragment of the PNPLA3 gene consists of about 20 consecutive nucleotides of the PNPLA3 gene. In some embodiments, the fragment of the PNPLA3 gene consists of about 21 consecutive nucleotides of the PNPLA3 gene. In some embodiments, the fragment of the PNPLA3 gene consists of about 22 consecutive nucleotides of the PNPLA3 gene. In some embodiments, the fragment of the PNPLA3 gene consists of about 23 consecutive nucleotides of the PNPLA3 gene.

[0087] In some embodiments, the sense strand comprises a sequence having less than or equal to 5, 4, 3, 2, or 1 nucleobase differences to a fragment of the PNPLA3 gene across the entire length of the sense strand, wherein the fragment of the PNPLA3 gene consists of about 15, 16, 17, 18, 19, 20, 21, 22, 23, 24, 25, 26, 27, 28, 29, or 30 consecutive nucleotides of the PNPLA3 gene. In some embodiments, the sense strand comprises a sequence having less than or equal to 5 nucleobase differences to a fragment of the PNPLA3 gene across the entire length of the sense strand, wherein the fragment of the PNPLA3 gene consists of about 15, 16, 17, 18, 19, 20, 21, 22, 23, 24, 25, 26, 27, 28, 29, or 30 consecutive nucleotides of the PNPLA3 gene. In some embodiments, the sense strand comprises a sequence having less than or equal to 4 nucleobase differences to a fragment of the PNPLA3 gene across the entire length of the sense strand, wherein the fragment of the PNPLA3 gene consists of about 15, 16, 17, 18, 19, 20, 21, 22, 23, 24, 25, 26, 27, 28, 29, or 30 consecutive nucleotides of the PNPLA3 gene. In some embodiments, the sense strand comprises a sequence having less than or equal to 3 nucleobase differences to a fragment of the PNPLA3 gene across the entire length of the sense strand, wherein the fragment of the PNPLA3 gene consists of about 15, 16, 17, 18, 19, 20, 21, 22, 23, 24, 25, 26, 27, 28, 29, or 30 consecutive nucleotides of the PNPLA3 gene. In some embodiments, the sense strand comprises a sequence having less than or equal to 2 nucleobase differences to a fragment of the PNPLA3 gene across the entire length of the sense strand, wherein the fragment of the PNPLA3 gene consists of about 15, 16, 17, 18, 19, 20, 21, 22, 23, 24, 25, 26, 27, 28, 29, or 30 consecutive nucleotides of the PNPLA3 gene. In some embodiments, the sense strand comprises a sequence having less than or equal to 1 nucleobase differences to a fragment of the PNPLA3 gene across the entire length of the sense strand, wherein the fragment of the PNPLA3 gene consists of about 15, 16, 17, 18, 19, 20, 21, 22, 23, 24, 25, 26, 27, 28, 29, or 30 consecutive nucleotides of the PNPLA3 gene. In some embodiments, the sense strand comprises a sequence having 0 nucleobase differences to a fragment of the PNPLA3 gene across the entire length of the sense strand, wherein the fragment of the PNPLA3 gene consists of about 15, 16, 17, 18, 19, 20, 21, 22, 23, 24, 25, 26, 27, 28, 29, or 30 consecutive nucleotides of the PNPLA3 gene. In some embodiments, the fragment of the PNPLA3 gene consists of about 15 consecutive nucleotides of the PNPLA3 gene. In some embodiments, the fragment of the PNPLA3 gene consists of about 16 consecutive nucleotides of the PNPLA3 gene. In some embodiments, the fragment of the PNPLA3 gene consists of about 17 consecutive nucleotides of the PNPLA3 gene. In some embodiments, the fragment of the PNPLA3 gene consists of about 18 consecutive nucleotides of the PNPLA3 gene. In some embodiments, the fragment of the PNPLA3 gene consists of about 19 consecutive nucleotides of the PNPLA3 gene. In some embodiments, the fragment of the PNPLA3 gene consists of about 20 consecutive nucleotides of the PNPLA3 gene. In some embodiments, the fragment of the PNPLA3 gene consists of about 21 consecutive nucleotides of the PNPLA3 gene. In some embodiments, the fragment of the PNPLA3 gene consists of about 22 consecutive nucleotides of the PNPLA3 gene. In some embodiments, the fragment of the PNPLA3 gene consists of about 23 consecutive nucleotides of the PNPLA3 gene.

[0088] In some embodiments, the sense strand comprises a nucleotide sequence of any one of SEQ ID NOs: 3-452, 903-1484, 2068-2107, 2148-2187, 2228-2252, 2278-2301, 2326-2339 or 2354-2358. In some embodiments, the sense strand comprises a nucleotide sequence that is at least about 60%, 65%, 70%, 75%, 80%, 85%, 90%, 95%, or 100% identical to the nucleotide sequence of any one of SEQ ID NOs: 3-452, 903-1484, 2068-2107, 2148-2187, 2228-2252, 2278-2301, 2326-2339 or 2354-2358 across the entire length of sense strand. In some embodiments, the sense strand comprises a nucleotide sequence that is at least about 70% identical to the nucleotide sequence of any one of SEQ ID NOs: 3-452, 903-1484, 2068-2107, 2148-2187, 2228-2252, 2278-2301, 2326-2339 or 2354-2358 across the entire length of sense strand. In some embodiments, the sense strand comprises a nucleotide sequence that is at least about 75% identical to the nucleotide sequence of any one of SEQ ID NOs: 3-452, 903-1484, 2068-2107, 2148-2187, 2228-2252, 2278-2301, 2326-2339 or 2354-2358 across the entire length of sense strand. In some embodiments, the sense strand comprises a nucleotide sequence that is at least about 80% identical to the nucleotide sequence of any one of SEQ ID NOs: 3-452, 903-1484, 2068-2107, 2148-2187, 2228-2252, 2278-2301, 2326-2339 or 2354-2358 across the entire length of sense strand. In some embodiments, the sense strand comprises a nucleotide sequence that is at least about 85% identical to the nucleotide sequence of any one of SEQ ID NOs: 3-452, 903-1484, 2068-2107, 2148-2187, 2228-2252, 2278-2301, 2326-2339 or 2354-2358 across the entire length of sense strand. In some embodiments, the sense strand comprises a nucleotide sequence that is at least about 90% identical to the nucleotide sequence of any one of SEQ ID NOs: 3-452, 903-1484, 2068-2107, 2148-2187, 2228-2252, 2278-2301, 2326-2339 or 2354-2358 across the entire length of sense strand. In some embodiments, the sense strand comprises a nucleotide sequence that is at least about 95% identical to the nucleotide sequence of any one of SEQ ID NOs: 3-452, 903-1484, 2068-2107, 2148-2187, 2228-2252, 2278-2301, 2326-2339 or 2354-2358 across the entire length of sense strand. In some embodiments, the sense strand comprises a nucleotide sequence that is about 100% identical to the nucleotide sequence of any one of SEQ ID NOs: 3-452, 903-1484, 2068-2107, 2148-2187, 2228-2252, 2278-2301, 2326-2339 or 2354-2358 across the entire length of sense strand.

[0089] In some embodiments, the sense strand comprises at least about 15, 16, 17, 18, 19, 20, or 21 consecutive nucleotides of the nucleotide sequence of any one of SEQ ID NOs: 3-452, 903-1484, 2068-2107, 2148-2187, 2228-2252, 2278-2301, 2326-2339 or 2354-2358. In some embodiments, the sense strand comprises at least about 17 consecutive nucleotides of the nucleotide sequence of any one of SEQ ID NOs: 3-452, 903-1484, 2068-2107, 2148-2187, 2228-2252, 2278-2301, 2326-2339 or 2354-2358. In some embodiments, the sense strand comprises at least about 18 consecutive nucleotides of the nucleotide sequence of any one of SEQ ID NOs: 3-452, 903-1484, 2068-2107, 2148-2187, 2228-2252, 2278-2301, 2326-2339 or 2354-2358. In some embodiments, the sense strand comprises at least about 19 consecutive nucleotides of the nucleotide sequence of any one of SEQ ID NOs: 3-452, 903-1484, 2068-2107, 2148-2187, 2228-2252, 2278-2301, 2326-2339 or 2354-2358. In some embodiments, the sense strand comprises at least about 20 consecutive nucleotides of the nucleotide sequence of any one of SEQ ID NOs: 3-452, 903-1484, 2068-2107, 2148-2187, 2228-2252, 2278-2301, 2326-2339 or 2354-2358. In some embodiments, the sense strand comprises at least about 21 consecutive nucleotides of the nucleotide sequence of any one of SEQ ID NOs: 3-452, 903-1484, 2068-2107, 2148-2187, 2228-2252, 2278-2301, 2326-2339 or 2354-2358.

[0090] In some embodiments, the sense strand comprises a nucleotide sequence having less than or equal to 5, 4, 3, 2, or 1 mismatches to the nucleotide sequence of any one of SEQ ID NOs: 453-902 or 1485-2066 across the entire length of the sense strand. In some embodiments, the sense strand comprises a nucleotide sequence having less than or equal to 5 nucleobase differences to the nucleotide sequence of any one of SEQ ID NOs: 453-902, 1485-2066, 2108-2147, 2188-2227, 2253-2277, 2302-2325 or 2340-2353 across the entire length of the sense strand. In some embodiments, the sense strand comprises a nucleotide sequence having less than or equal to 4 nucleobase differences to the nucleotide sequence of any one of SEQ ID NOs: 453-902, 1485-2066, 2108-2147, 2188-2227, 2253-2277, 2302-2325 or 2340-2353 across the entire length of the sense strand. In some embodiments, the sense strand comprises a nucleotide sequence having less than or equal to 3 nucleobase differences to the nucleotide sequence of any one of SEQ ID NOs: 453-902, 1485-2066, 2108-2147, 2188-2227, 2253-2277, 2302-2325 or 2340-2353 across the entire length of the sense strand. In some embodiments, the sense strand comprises a nucleotide sequence having less than or equal to 2 nucleobase differences to the nucleotide sequence of any one of SEQ ID NOs: 453-902, 1485-2066, 2108-2147, 2188-2227, 2253-2277, 2302-2325 or 2340-2353 across the entire length of the sense strand. In some embodiments, the sense strand comprises a nucleotide sequence having less than or equal to 1 nucleobase differences to the nucleotide sequence of any one of SEQ ID NOs: 453-902, 1485-2066, 2108-2147, 2188-2227, 2253-2277, 2302-2325 or 2340-2353 across the entire length of the sense strand. In some embodiments, the sense strand comprises a nucleotide sequence having 0 nucleobase differences to the nucleotide sequence of any one of SEQ ID NOs: 453-902, 1485-2066, 2108-2147, 2188-2227, 2253-2277, 2302-2325 or 2340-2353 across the entire length of the sense strand.

[0091] In some embodiments, the sense strand comprises a nucleotide sequence of any of the sense strands listed in Table 1 or Table 1A or Table 2. In some embodiments, the sense strand comprises a nucleotide sequence of any of the sense strands listed in Table 1. In some embodiments, the sense strand comprises a nucleotide sequence of any of the sense strands listed in Table 1A. In some embodiments, the sense strand comprises a nucleotide sequence of any of the sense strands listed in Table 2.

[0092] In some embodiments, the sense strand may comprise an overhang sequence. In some embodiments, the overhang sequence comprises at least about 1, 2, 3, 4, or 5 or more nucleotides. In some embodiments, the overhang sequence comprises at least about 1 nucleotide. In some embodiments, the overhang sequence comprises at least about 2 nucleotides. In some embodiments, the overhang sequence comprises at least about 3 nucleotides. In some embodiments, the overhang sequence comprises at least about 4 nucleotides. In some embodiments, the overhang sequence comprises at least about 5 nucleotides. In some embodiments, the overhang sequence comprises a UU sequence.

[0093] In some embodiments, the sense strand may comprise at least 1, 2, 3, or 4 phosphorothioate internucleoside linkages. In some embodiments, at least one phosphorothioate internucleoside linkage is between the nucleotides at positions 1 and 2 from the 5′ end of the sense strand. In some embodiments, at least one phosphorothioate internucleoside linkage is between the nucleotides at positions 2 and 3 from the 5′ end of the sense strand. In some embodiments, at least one phosphorothioate internucleoside linkage is between the nucleotides at positions 1 and 2 from the 3′ end of the sense strand. In some embodiments, at least one phosphorothioate internucleoside linkage is between the nucleotides at positions 2 and 3 from the 3′ end of the sense strand.

[0094] In some embodiments, the sense strand may comprise a nucleotide sequence comprising 2′-fluoro nucleotides at positions 5 and 7-9 from the 5′ end of the nucleotide sequence. In some embodiments, the sense strand may comprise a nucleotide sequence comprising 2′-fluoro nucleotides at positions 7 and 9-11 from the 5′ end of the nucleotide sequence. In some embodiments, the sense strand may comprise a nucleotide comprising 2′-fluoro nucleotides at positions 5, 9-11, 14, and 19 from the 5′ end of the nucleotide sequence.

[0095] In some embodiments, the sense strand may comprise a nucleotide sequence consisting of 19 to 23, or 19 to 21, nucleotides, wherein 2′-fluoro nucleotides are at positions 5 and 7-9 from the 5′ end of the nucleotide sequence. In some embodiments, the sense strand may comprise a nucleotide sequence consisting of 19 to 23, or 19 to 21, nucleotides, wherein 2′-fluoro nucleotides are at positions 7 and 9-11 from the 5′ end of the nucleotide sequence. In some embodiments, the sense strand may comprise a nucleotide sequence consisting of 19 to 23, or 19 to 21, nucleotides, wherein 2′-fluoro nucleotides are at positions 5, 9-11, 14, and 19 from the 5′ end of the nucleotide sequence.

### Antisense Strand

[0096] Any of the siRNA molecules described herein may comprise an antisense strand. In some embodiments, the antisense strand comprises between about 15 to about 50 nucleotides. In some embodiments, the antisense strand comprises between about 15 to about 45 nucleotides. In some embodiments, the antisense strand comprises between about 15 to about 40 nucleotides. In some embodiments, the antisense strand comprises between about 15 to about 35 nucleotides. In some embodiments, the antisense strand comprises between about 15 to about 30 nucleotides. In some embodiments, the antisense strand comprises between about 15 to about 25 nucleotides. In some embodiments, the antisense strand comprises between about 17 to about 23 nucleotides. In some embodiments, the antisense strand comprises between about 17 to about 22 nucleotides. In some embodiments, the antisense strand comprises between about 17 to about 21 nucleotides. In some embodiments, the antisense strand comprises between about 18 to about 23 nucleotides. In some embodiments, the antisense strand comprises between about 18 to about 22 nucleotides. In some embodiments, the antisense strand comprises between about 18 to about 21 nucleotides. In some embodiments, the antisense strand comprises between about 19 to about 23 nucleotides. In some embodiments, the antisense strand comprises between about 19 to about 22 nucleotides. In some embodiments, the antisense strand comprises between about 19 to about 21 nucleotides.

[0097] In some embodiments, the antisense strand comprises at least about 15, 16, 17, 18, 19, 20, 21, 22, 23, 24, 25, 26, 27, 28, 29, or 30 or more nucleotides. In some embodiments, the antisense strand comprises at least about 15 nucleotides. In some embodiments, the antisense strand comprises at least about 16 nucleotides. In some embodiments, the antisense strand comprises at least about 17 nucleotides. In some embodiments, the antisense strand comprises at least about 18 nucleotides. In some embodiments, the antisense strand comprises at least about 19 nucleotides. In some embodiments, the antisense strand comprises at least about 20 nucleotides. In some embodiments, the antisense strand comprises at least about 21 nucleotides. In some embodiments, the antisense strand comprises at least about 22 nucleotides. In some embodiments, the antisense strand comprises at least about 23 nucleotides.

[0098] In some embodiments, the antisense strand comprises less than about 50, 45, 40, 35, 30, 29, 28, 27, 26, 25, 24, 23, 22, 21, 20, or 19 or fewer nucleotides. In some embodiments, the antisense strand comprises less than about 30 nucleotides. In some embodiments, the antisense strand comprises less than about 25 nucleotides. In some embodiments, the antisense strand comprises less than about 24 nucleotides. In some embodiments, the antisense strand comprises less than about 23 nucleotides. In some embodiments, the antisense strand comprises less than about 22 nucleotides. In some embodiments, the antisense strand comprises less than about 21 nucleotides. In some embodiments, the antisense strand comprises less than about 20 nucleotides. In some embodiments, the antisense strand comprises less than about 19 nucleotides.

[0099] In some embodiments, the antisense strand comprises a sequence that is at least about 60%, 65%, 70%, 75%, 80%, 85%, 90%, 95%, or 100% complementary to a fragment of the PNPLA3 gene across the entire length of the antisense strand. In some embodiments, the antisense strand comprises a sequence that is at least about 70% complementary to a fragment of the PNPLA3 gene across the entire length of the antisense strand. In some embodiments, the antisense strand comprises a sequence that is at least about 75% complementary to a fragment of the PNPLA3 gene across the entire length of the antisense strand. In some embodiments, the antisense strand comprises a sequence that is at least about 80% complementary to a fragment of the PNPLA3 gene across the entire length of the antisense strand. In some embodiments, the antisense strand comprises a sequence that is at least about 85% complementary to a fragment of the PNPLA3 gene across the entire length of the antisense strand. In some embodiments, the antisense strand comprises a sequence that is at least about 90% complementary to a fragment of the PNPLA3 gene across the entire length of the antisense strand. In some embodiments, the antisense strand comprises a sequence that is at least about 95% complementary to a fragment of the PNPLA3 gene across the entire length of the antisense strand. In some embodiments, the antisense strand comprises a sequence that is about 100% complementary to a fragment of the PNPLA3 gene across the entire length of the antisense strand. In some embodiments, the fragment of the PNPLA3 gene consists of about 15, 16, 17, 18, 19, 20, 21, 22, 23, 24, 25, 26, 27, 28, 29, or 30 consecutive nucleotides of the PNPLA3 gene. In some embodiments, the fragment of the PNPLA3 gene consists of about 15 consecutive nucleotides of the PNPLA3 gene. In some embodiments, the fragment of the PNPLA3 gene consists of about 16 consecutive nucleotides of the PNPLA3 gene. In some embodiments, the fragment of the PNPLA3 gene consists of about 17 consecutive nucleotides of the PNPLA3 gene. In some embodiments, the fragment of the PNPLA3 gene consists of about 18 consecutive nucleotides of the PNPLA3 gene. In some embodiments, the fragment of the PNPLA3 gene consists of about 19 consecutive nucleotides of the PNPLA3 gene. In some embodiments, the fragment of the PNPLA3 gene consists of about 20 consecutive nucleotides of the PNPLA3 gene. In some embodiments, the fragment of the PNPLA3 gene consists of about 21 consecutive nucleotides of the PNPLA3 gene. In some embodiments, the fragment of the PNPLA3 gene consists of about 22 consecutive nucleotides of the PNPLA3 gene. In some embodiments, the fragment of the PNPLA3 gene consists of about 23 consecutive nucleotides of the PNPLA3 gene.

[0100] In some embodiments, the antisense strand comprises a sequence having between about 15 to about 50 consecutive nucleotides complementary to a fragment of the PNPLA3 gene. In some embodiments, the antisense strand comprises a sequence having between about 15 to about 45 consecutive nucleotides complementary to a fragment of the PNPLA3 gene. In some embodiments, the antisense strand comprises a sequence having between about 15 to about 40 consecutive nucleotides complementary to a fragment of the PNPLA3 gene. In some embodiments, the antisense strand comprises a sequence having between about 15 to about 35 consecutive nucleotides complementary to a fragment of the PNPLA3 gene. In some embodiments, the antisense strand comprises a sequence having between about 15 to about 30 consecutive nucleotides complementary to a fragment of the PNPLA3 gene. In some embodiments, the antisense strand comprises a sequence having between about 15 to about 25 consecutive nucleotides complementary to a fragment of the PNPLA3 gene. In some embodiments, the antisense strand comprises between about 17 to about 23 consecutive nucleotides complementary to a fragment of the PNPLA3 gene. In some embodiments, the antisense strand comprises between about 17 to about 22 consecutive nucleotides complementary to a fragment of the PNPLA3 gene. In some embodiments, the antisense strand comprises between about 17 to about 21 consecutive nucleotides complementary to a fragment of the PNPLA3 gene. In some embodiments, the antisense strand comprises between about 18 to about 23 consecutive nucleotides complementary to a fragment of the PNPLA3 gene. In some embodiments, the antisense strand comprises between about 18 to about 22 consecutive nucleotides complementary to a fragment of the PNPLA3 gene. In some embodiments, the antisense strand comprises between about 18 to about 21 consecutive nucleotides complementary to a fragment of the PNPLA3 gene. In some embodiments, the antisense strand comprises between about 19 to about 23 consecutive nucleotides complementary to a fragment of the PNPLA3 gene. In some embodiments, the antisense strand comprises between about 19 to about 22 consecutive nucleotides of a fragment of the PNPLA3 gene. In some embodiments, the antisense strand comprises between about 19 to about 21 consecutive nucleotides complementary to a fragment of the PNPLA3 gene. In some embodiments, the fragment of the PNPLA3 gene consists of about 15, 16, 17, 18, 19, 20, 21, 22, 23, 24, 25, 26, 27, 28, 29, or 30 consecutive nucleotides of the PNPLA3 gene. In some embodiments, the fragment of the PNPLA3 gene consists of about 15 consecutive nucleotides of the PNPLA3 gene. In some embodiments, the fragment of the PNPLA3 gene consists of about 16 consecutive nucleotides of the PNPLA3 gene. In some embodiments, the fragment of the PNPLA3 gene consists of about 17 consecutive nucleotides of the PNPLA3 gene. In some embodiments, the fragment of the PNPLA3 gene consists of about 18 consecutive nucleotides of the PNPLA3 gene. In some embodiments, the fragment of the PNPLA3 gene consists of about 19 consecutive nucleotides of the PNPLA3 gene. In some embodiments, the fragment of the PNPLA3 gene consists of about 20 consecutive nucleotides of the PNPLA3 gene. In some embodiments, the fragment of the PNPLA3 gene consists of about 21 consecutive nucleotides of the PNPLA3 gene. In some embodiments, the fragment of the PNPLA3 gene consists of about 22 consecutive nucleotides of the PNPLA3 gene. In some embodiments, the fragment of the PNPLA3 gene consists of about 23 consecutive nucleotides of the PNPLA3 gene.

[0101] In some embodiments, the antisense strand comprises a sequence having at least about 15, 16, 17, 18, 19, 20, 21, 22, 23, 24, 25, 26, 27, 28, 29, or 30 or more consecutive nucleotides complementary to a fragment of the PNPLA3 gene. In some embodiments, the antisense strand comprises a sequence having at least about 15 consecutive nucleotides complementary to a fragment of the PNPLA3 gene. In some embodiments, the antisense strand comprises a sequence having at least about 16 consecutive nucleotides complementary to a fragment of the PNPLA3 gene. In some embodiments, the antisense strand comprises a sequence having at least about 17 consecutive nucleotides complementary to a fragment of the PNPLA3 gene. In some embodiments, the antisense strand comprises a sequence having at least about 18 consecutive nucleotides complementary to a fragment of the PNPLA3 gene. In some embodiments, the antisense strand comprises a sequence having at least about 19 consecutive nucleotides complementary to a fragment of the PNPLA3 gene. In some embodiments, the antisense strand comprises a sequence having at least about 20 consecutive nucleotides complementary to a fragment of the PNPLA3 gene. In some embodiments, the antisense strand comprises a sequence having at least about 21 consecutive nucleotides complementary to a fragment of the PNPLA3 gene. In some embodiments, the antisense strand comprises a sequence having at least about 22 consecutive nucleotides complementary to a fragment of the PNPLA3 gene. In some embodiments, the antisense strand comprises a sequence having at least about 23 consecutive nucleotides complementary to a fragment of the PNPLA3 gene. In some embodiments, the fragment of the PNPLA3 gene consists of about 15, 16, 17, 18, 19, 20, 21, 22, 23, 24, 25, 26, 27, 28, 29, or 30 consecutive nucleotides of the PNPLA3 gene. In some embodiments, the fragment of the PNPLA3 gene consists of about 15 consecutive nucleotides of the PNPLA3 gene. In some embodiments, the fragment of the PNPLA3 gene consists of about 16 consecutive nucleotides of the PNPLA3 gene. In some embodiments, the fragment of the PNPLA3 gene consists of about 17 consecutive nucleotides of the PNPLA3 gene. In some embodiments, the fragment of the PNPLA3 gene consists of about 18 consecutive nucleotides of the PNPLA3 gene. In some embodiments, the fragment of the PNPLA3 gene consists of about 19 consecutive nucleotides of the PNPLA3 gene. In some embodiments, the fragment of the PNPLA3 gene consists of about 20 consecutive nucleotides of the PNPLA3 gene. In some embodiments, the fragment of the PNPLA3 gene consists of about 21 consecutive nucleotides of the PNPLA3 gene. In some embodiments, the fragment of the PNPLA3 gene consists of about 22 consecutive nucleotides of the PNPLA3 gene. In some embodiments, the fragment of the PNPLA3 gene consists of about 23 consecutive nucleotides of the PNPLA3 gene.

[0102] In some embodiments, the antisense strand comprises a sequence having less than about 50, 45, 40, 35, 30, 29, 28, 27, 26, 25, 24, 23, 22, 21, 20, or 19 or fewer consecutive nucleotides complementary to a fragment of the PNPLA3 gene. In some embodiments, the antisense strand comprises a sequence having less than about 35 consecutive nucleotides complementary to a fragment of the PNPLA3 gene. In some embodiments, the antisense strand comprises a sequence having less than about 30 consecutive nucleotides complementary to a fragment of the PNPLA3 gene. In some embodiments, the antisense strand comprises a sequence having less than about 25 consecutive nucleotides complementary to a fragment of the PNPLA3 gene. In some embodiments, the antisense strand comprises a sequence having less than about 24 consecutive nucleotides complementary to a fragment of the PNPLA3 gene. In some embodiments, the antisense strand comprises a sequence having less than about 23 consecutive nucleotides complementary to a fragment of the PNPLA3 gene. In some embodiments, the antisense strand comprises a sequence having less than about 22 consecutive nucleotides complementary to a fragment of the PNPLA3 gene. In some embodiments, the antisense strand comprises a sequence having less than about 21 consecutive nucleotides complementary to a fragment of the PNPLA3 gene. In some embodiments, the antisense strand comprises a sequence having less than about 20 consecutive nucleotides complementary to a fragment of the PNPLA3 gene. In some embodiments, the antisense strand comprises a sequence having less than about 19 consecutive nucleotides complementary to a fragment of the PNPLA3 gene. In some embodiments, the fragment of the PNPLA3 gene consists of about 15, 16, 17, 18, 19, 20, 21, 22, 23, 24, 25, 26, 27, 28, 29, or 30 consecutive nucleotides of the PNPLA3 gene. In some embodiments, the fragment of the PNPLA3 gene consists of about 15 consecutive nucleotides of the PNPLA3 gene. In some embodiments, the fragment of the PNPLA3 gene consists of about 16 consecutive nucleotides of the PNPLA3 gene. In some embodiments, the fragment of the PNPLA3 gene consists of about 17 consecutive nucleotides of the PNPLA3 gene. In some embodiments, the fragment of the PNPLA3 gene consists of about 18 consecutive nucleotides of the PNPLA3 gene. In some embodiments, the fragment of the PNPLA3 gene consists of about 19 consecutive nucleotides of the PNPLA3 gene. In some embodiments, the fragment of the PNPLA3 gene consists of about 20 consecutive nucleotides of the PNPLA3 gene. In some embodiments, the fragment of the PNPLA3 gene consists of about 21 consecutive nucleotides of the PNPLA3 gene. In some embodiments, the fragment of the PNPLA3 gene consists of about 22 consecutive nucleotides of the PNPLA3 gene. In some embodiments, the fragment of the PNPLA3 gene consists of about 23 consecutive nucleotides of the PNPLA3 gene.

[0103] In some embodiments, the antisense strand comprises a sequence having less than or equal to 5, 4, 3, 2, or 1 mismatches to a fragment of the PNPLA3 gene across the entire length of the antisense strand, wherein the fragment of the PNPLA3 gene consists of about 15, 16, 17, 18, 19, 20, 21, 22, 23, 24, 25, 26, 27, 28, 29, or 30 consecutive nucleotides of the PNPLA3 gene. In some embodiments, the antisense strand comprises a sequence having less than or equal to 5 mismatches to a fragment of the PNPLA3 gene across the entire length of the antisense strand, wherein the fragment of the PNPLA3 gene consists of about 15, 16, 17, 18, 19, 20, 21, 22, 23, 24, 25, 26, 27, 28, 29, or 30 consecutive nucleotides of the PNPLA3 gene. In some embodiments, the antisense strand comprises a sequence having less than or equal to 4 mismatches to a fragment of the PNPLA3 gene across the entire length of the antisense strand, wherein the fragment of the PNPLA3 gene consists of about 15, 16, 17, 18, 19, 20, 21, 22, 23, 24, 25, 26, 27, 28, 29, or 30 consecutive nucleotides of the PNPLA3 gene. In some embodiments, the antisense strand comprises a sequence having less than or equal to 3 mismatches to a fragment of the PNPLA3 gene across the entire length of the antisense strand, wherein the fragment of the PNPLA3 gene consists of about 15, 16, 17, 18, 19, 20, 21, 22, 23, 24, 25, 26, 27, 28, 29, or 30 consecutive nucleotides of the PNPLA3 gene. In some embodiments, the antisense strand comprises a sequence having less than or equal to 2 mismatches to a fragment of the PNPLA3 gene across the entire length of the antisense strand, wherein the fragment of the PNPLA3 gene consists of about 15, 16, 17, 18, 19, 20, 21, 22, 23, 24, 25, 26, 27, 28, 29, or 30 consecutive nucleotides of the PNPLA3 gene. In some embodiments, the antisense strand comprises a sequence having less than or equal to 1 mismatches to a fragment of the PNPLA3 gene across the entire length of the antisense strand, wherein the fragment of the PNPLA3 gene consists of about 15, 16, 17, 18, 19, 20, 21, 22, 23, 24, 25, 26, 27, 28, 29, or 30 consecutive nucleotides of the PNPLA3 gene. In some embodiments, the antisense strand comprises a sequence having 0 mismatches to a fragment of the PNPLA3 gene across the entire length of the antisense strand, wherein the fragment of the PNPLA3 gene consists of about 15, 16, 17, 18, 19, 20, 21, 22, 23, 24, 25, 26, 27, 28, 29, or 30 consecutive nucleotides of the PNPLA3 gene. In some embodiments, the fragment of the PNPLA3 gene consists of about 15 consecutive nucleotides of the PNPLA3 gene. In some embodiments, the fragment of the PNPLA3 gene consists of about 16 consecutive nucleotides of the PNPLA3 gene. In some embodiments, the fragment of the PNPLA3 gene consists of about 17 consecutive nucleotides of the PNPLA3 gene. In some embodiments, the fragment of the PNPLA3 gene consists of about 18 consecutive nucleotides of the PNPLA3 gene. In some embodiments, the fragment of the PNPLA3 gene consists of about 19 consecutive nucleotides of the PNPLA3 gene. In some embodiments, the fragment of the PNPLA3 gene consists of about 20 consecutive nucleotides of the PNPLA3 gene. In some embodiments, the fragment of the PNPLA3 gene consists of about 21 consecutive nucleotides of the PNPLA3 gene. In some embodiments, the fragment of the PNPLA3 gene consists of about 22 consecutive nucleotides of the PNPLA3 gene. In some embodiments, the fragment of the PNPLA3 gene consists of about 23 consecutive nucleotides of the PNPLA3 gene.

[0104] In some embodiments, the antisense strand comprises a nucleotide sequence of any one of SEQ ID NOs: 453-902, 1485-2066, 2108-2147, 2188-2227, 2253-2277, 2302-2325 or 2340-2353. In some embodiments, the antisense strand comprises a nucleotide sequence that is at least about 60%, 65%, 70%, 75%, 80%, 85%, 90%, 95%, or 100% identical to the nucleotide sequence of any one of SEQ ID NOs: 453-902, 1485-2066, 2108-2147, 2188-2227, 2253-2277, 2302-2325 or 2340-2353 across the entire length of antisense strand. In some embodiments, the antisense strand comprises a nucleotide sequence that is at least about 70% identical to the nucleotide sequence of any one of SEQ ID NOs: 453-902, 1485-2066, 2108-2147, 2188-2227, 2253-2277, 2302-2325 or 2340-2353 across the entire length of antisense strand. In some embodiments, the antisense strand comprises a nucleotide sequence that is at least about 75% identical to the nucleotide sequence of any one of SEQ ID NOs: 453-902, 1485-2066, 2108-2147, 2188-2227, 2253-2277, 2302-2325 or 2340-2353 across the entire length of antisense strand. In some embodiments, the antisense strand comprises a nucleotide sequence that is at least about 80% identical to the nucleotide sequence of any one of SEQ ID NOs: 453-902, 1485-2066, 2108-2147, 2188-2227, 2253-2277, 2302-2325 or 2340-2353 across the entire length of antisense strand. In some embodiments, the antisense strand comprises a nucleotide sequence that is at least about 85% identical to the nucleotide sequence of any one of SEQ ID NOs: 453-902, 1485-2066, 2108-2147, 2188-2227, 2253-2277, 2302-2325 or 2340-2353 across the entire length of antisense strand. In some embodiments, the antisense strand comprises a nucleotide sequence that is at least about 90% identical to the nucleotide sequence of any one of SEQ ID NOs: 453-902, 1485-2066, 2108-2147, 2188-2227, 2253-2277, 2302-2325 or 2340-2353 across the entire length of antisense strand. In some embodiments, the antisense strand comprises a nucleotide sequence that is at least about 95% identical to the nucleotide sequence of any one of SEQ ID NOs: 453-902, 1485-2066, 2108-2147, 2188-2227, 2253-2277, 2302-2325 or 2340-2353 across the entire length of antisense strand. In some embodiments, the antisense strand comprises a nucleotide sequence that is about 100% identical to the nucleotide sequence of any one of SEQ ID NOs: 453-902, 1485-2066, 2108-2147, 2188-2227, 2253-2277, 2302-2325 or 2340-2353 across the entire length of antisense strand.

[0105] In some embodiments, the antisense strand comprises at least about 15, 16, 17, 18, 19, 20, 21, 22, or 23 consecutive nucleotides of the nucleotide sequence of any one of SEQ ID NOs: 453-902, 1485-2066, 2108-2147, 2188-2227, 2253-2277, 2302-2325 or 2340-2353. In some embodiments, the antisense strand comprises at least about 17 consecutive nucleotides of the nucleotide sequence of any one of SEQ ID NOs: 453-902, 1485-2066, 2108-2147, 2188-2227, 2253-2277, 2302-2325 or 2340-2353. In some embodiments, the antisense strand comprises at least about 18 consecutive nucleotides of the nucleotide sequence of any one of SEQ ID NOs: 453-902, 1485-2066, 2108-2147, 2188-2227, 2253-2277, 2302-2325 or 2340-2353. In some embodiments, the antisense strand comprises at least about 19 consecutive nucleotides of the nucleotide sequence of any one of SEQ ID NOs: 453-902, 1485-2066, 2108-2147, 2188-2227, 2253-2277, 2302-2325 or 2340-2353. In some embodiments, the antisense strand comprises at least about 20 consecutive nucleotides of the nucleotide sequence of any one of SEQ ID NOs: 453-902, 1485-2066, 2108-2147, 2188-2227, 2253-2277, 2302-2325 or 2340-2353. In some embodiments, the antisense strand comprises at least about 21 consecutive nucleotides of the nucleotide sequence of any one of SEQ ID NOs: 453-902, 1485-2066, 2108-2147, 2188-2227, 2253-2277, 2302-2325 or 2340-2353. In some embodiments, the antisense strand comprises at least about 22 consecutive nucleotides of the nucleotide sequence of any one of SEQ ID NOs: 453-902, 1485-2066, 2108-2147, 2188-2227, 2253-2277, 2302-2325 or 2340-2353. In some embodiments, the antisense strand comprises at least about 23 consecutive nucleotides of the nucleotide sequence of any one of SEQ ID NOs: 453-902, 1485-2066, 2108-2147, 2188-2227, 2253-2277, 2302-2325 or 2340-2353.

[0106] In some embodiments, the antisense strand comprises a nucleotide sequence having less than or equal to 5, 4, 3, 2, or 1 mismatches to the nucleotide sequence of any one of SEQ ID NOs: 3-452, 903-1484, 2068-2107, 2148-2187, 2228-2253, 2278-2301, 2326-2339 or 2354-2358 across the entire length of the antisense strand. In some embodiments, the antisense strand comprises a nucleotide sequence having less than or equal to 5 mismatches to the nucleotide sequence of any one of SEQ ID NOs: 3-452, 903-1484, 2068-2107, 2148-2187, 2228-2253, 2278-2301, 2326-2339 or 2354-2358 across the entire length of the antisense strand. In some embodiments, the antisense strand comprises a nucleotide sequence having less than or equal to 4 mismatches to the nucleotide sequence of any one of SEQ ID NOs: 3-452, 903-1484, 2068-2107, 2148-2187, 2228-2253, 2278-2301, 2326-2339 or 2354-2358 across the entire length of the antisense strand. In some embodiments, the antisense strand comprises a nucleotide sequence having less than or equal to 3 mismatches to the nucleotide sequence of any one of SEQ ID NOs: 3-452, 903-1484, 2068-2107, 2148-2187, 2228-2253, 2278-2301, 2326-2339 or 2354-2358 across the entire length of the antisense strand. In some embodiments, the antisense strand comprises a nucleotide sequence having less than or equal to 2 mismatches to the nucleotide sequence of any one of SEQ ID NOs: 3-452, 903-1484, 2068-2107, 2148-2187, 2228-2253, 2278-2301, 2326-2339 or 2354-2358 across the entire length of the antisense strand. In some embodiments, the antisense strand comprises a nucleotide sequence having less than or equal to 1 mismatches to the nucleotide sequence of any one of SEQ ID NOs: 3-452, 903-1484, 2068-2107, 2148-2187, 2228-2253, 2278-2301, 2326-2339 or 2354-2358 across the entire length of the antisense strand. In some embodiments, the antisense strand comprises a nucleotide sequence having 0 mismatches to the nucleotide sequence of any one of SEQ ID NOs: 3-452, 903-1484, 2068-2107, 2148-2187, 2228-2253, 2278-2301, 2326-2339 or 2354-2358 across the entire length of the antisense strand.

[0107] In some embodiments, the antisense strand comprises a nucleotide sequence of any of the antisense strands listed in Table 1 or Table 1A or Table 2. In some embodiments, the antisense strand comprises a nucleotide sequence of any of the antisense strands listed in Table 1. In some embodiments, the antisense strand comprises a nucleotide sequence of any of the antisense strands listed in Table 1A. In some embodiments, the antisense strand comprises a nucleotide sequence of any of the antisense strands listed in Table 2.

[0108] In some embodiments, the antisense strand may comprise an overhang sequence. In some embodiments, the overhang sequence comprises at least about 1, 2, 3, 4, or 5 or more nucleotides. In some embodiments, the overhang sequence comprises at least about 1 nucleotide. In some embodiments, the overhang sequence comprises at least about 2 nucleotides. In some embodiments, the overhang sequence comprises at least about 3 nucleotides. In some embodiments, the overhang sequence comprises at least about 4 nucleotides. In some embodiments, the overhang sequence comprises at least about 5 nucleotides. In some embodiments, the overhang sequence comprises a UU sequence.

[0109] In some embodiments, the antisense strand may comprise at least 1, 2, 3, or 4 phosphorothioate internucleoside linkages. In some embodiments, at least one phosphorothioate internucleoside linkage is between the nucleotides at positions 1 and 2 from the 5′ end of the antisense strand. In some embodiments, at least one phosphorothioate internucleoside linkage is between the nucleotides at positions 2 and 3 from the 5′ end of the antisense strand. In some embodiments, at least one phosphorothioate internucleoside linkage is between the nucleotides at positions 1 and 2 from the 3′ end of the antisense strand. In some embodiments, at least one phosphorothioate internucleoside linkage is between the nucleotides at positions 2 and 3 from the 3′ end of the antisense strand.

[0110] In some embodiments, the antisense strand may comprise a nucleotide sequence comprising 2′-fluoro nucleotides at positions 2, 6, 14, and 16 from the 5′ end of the nucleotide sequence. In some embodiments, the antisense strand may comprise a nucleotide sequence comprising 2′-fluoro nucleotides at positions 2 and 14 from the 5′ end of the nucleotide sequence. In some embodiments, the antisense strand may comprise a nucleotide sequence comprising 2′-fluoro nucleotides at positions 2, 5, 8, 14, and 17 from the 5′ end of the nucleotide sequence.

[0111] In some embodiments, the antisense strand may comprise a nucleotide sequence consisting of 17 to 23, or 19 to 23, nucleotides, wherein 2′-fluoro nucleotides are at positions 2, 6, 14, and 16 from the 5′ end of the nucleotide sequence. In some embodiments, the antisense strand may comprise a nucleotide sequence consisting of 17 to 23, or 19 to 23, nucleotides, wherein 2′-fluoro nucleotides are at positions 2 and 14 from the 5′ end of the nucleotide sequence. In some embodiments, the antisense strand may comprise a nucleotide sequence consisting of 17 to 23, or 19 to 23, nucleotides, wherein 2′-fluoro nucleotides are at positions 2, 5, 8, 14, and 17 from the 5′ end of the nucleotide sequence.

Modified siRNAs

[0112] In some embodiments, the siRNA molecules disclosed herein may be chemically modified. In some embodiments, the siRNA molecules may be modified, for example, to enhance stability and/or bioavailability and/or provide otherwise beneficial characteristics in vitro, in vivo, and/or ex vivo. For example, siRNA molecules may be modified such that the two strands (sense and antisense) maintain the ability to hybridize to each other and/or the siRNA molecules maintain the ability to hybridize to a target sequence. Examples of siRNA modifications include modifications to the ribose sugar, nucleobase, and/or phosphodiester backbone, including but not limited to those described herein. Non-limiting examples of siRNA modifications are described, e.g., in WO 2020/243490; WO 2020/097342; WO 2021/119325; PCT/US2021/019629; PCT/US2021/019628; PCT/US2021/021199; Sig. Transduct. Target Ther. 5 (101), 1-25, 2020; and J. Am. Chem. Soc. 136 (49), 16958-16961, 2014, the contents of each of which are hereby incorporated herein by reference in their entirety.

[0113] In some embodiments, the siRNA molecules disclosed herein comprise modified nucleotides having a modification of the ribose sugar. These sugar modifications can include modifications at the 2′ and/or 5′ position of the pentose ring as well as bicyclic sugar modifications. A 2′-modified nucleotide refers to a nucleotide having a pentose ring with a substituent at the 2′ position other than H or OH. Such 2′ modifications include, but are not limited to, 2′-OH, 2′-S-alkyl, 2′-N-alkyl, 2′-O-alkyl, 2′-S-alkenyl, 2′-N-alkenyl, 2′-O-alkenyl, 2′-S-alkynyl, 2′-N-alkynyl, 2′-O-alkynyl, 2′-O-allyl, 2′-C-allyl, 2′-fluoro, 2′-O-methyl (OMe or OCH₃), 2′-O-methoxyethyl, 2′-ara-F, 2′-OCF₃, 2′-O(CH₂)₂SCH₃, 2′-O-aminoalkyl, 2′-amino (e.g. NH₂), 2′-O-ethylamine, and 2′-azido, wherein the alkyl, alkenyl and alkynyl can be substituted or unsubstituted. Modifications at the 5′ position of the pentose ring include, but are not limited to, 5′-methyl (R or S), 5′-vinyl, and 5′-methoxy. Sugar modifications may also include, for example, LNA, UNA, GNA, and DNA. In some embodiments, the siRNA molecules of the disclosure comprise one or more 2′-O-methyl nucleotides, 2′-fluoro nucleotides, or combinations thereof.

[0114] In some embodiments, between about 15 to 30, 15 to 25, 15 to 24, 15 to 23, 15 to 22, 15 to 21, 17 to 30, 17 to 25, 17 to 24, 17 to 23, 17 to 22, 17 to 21, 18 to 30, 18 to 25, 18 to 24, 18 to 23, 18 to 22, 18 to 21, 19 to 30, 19 to 25, 19 to 24, 19 to 23, 19 to 22, 19 to 21, 20 to 25, 20 to 24, 20 to 23, 21 to 25, 21 to 24, or 21 to 23 modified nucleotides of any sense or antisense nucleotide sequences described herein are 2′-O-methyl nucleotides. In some embodiments, between about 2 to 20 modified nucleotides of any sense or antisense nucleotide sequences described herein are 2′-O-methyl nucleotides. In some embodiments, between about 5 to 25 modified nucleotides of any sense or antisense nucleotide sequences described herein are 2′-O-methyl nucleotides. In some embodiments, between about 10 to 25 modified nucleotides of any sense or antisense nucleotide sequences described herein are 2′-O-methyl nucleotides. In some embodiments, between about 12 to 25 modified nucleotides of any sense or antisense nucleotide sequences described herein are 2′-O-methyl nucleotides. In some embodiments, at least about 10, 11, 12, 13, 14, 15, 16, 17, 18, 19, 20, 21, or 22 modified nucleotides of any sense or antisense nucleotide sequences described herein are 2′-O-methyl nucleotides. In some embodiments, at least about 12 modified nucleotides of any sense or antisense nucleotide sequences described herein are 2′-O-methyl nucleotides. In some embodiments, at least about 13 modified nucleotides of any sense or antisense nucleotide sequences described herein are 2′-O-methyl nucleotides. In some embodiments, at least about 14 modified nucleotides of any sense or antisense nucleotide sequences described herein are 2′-O-methyl nucleotides. In some embodiments, at least about 15 modified nucleotides of any sense or antisense nucleotide sequences described herein are 2′-O-methyl nucleotides. In some embodiments, at least about 16 modified nucleotides of any sense or antisense nucleotide sequences described herein are 2′-O-methyl nucleotides. In some embodiments, at least about 17 modified nucleotides of any sense or antisense nucleotide sequences described herein are 2′-O-methyl nucleotides. In some embodiments, at least about 18 modified nucleotides of any sense or antisense nucleotide sequences described herein are 2′-O-methyl nucleotides. In some embodiments, at least about 19 modified nucleotides of any sense or antisense nucleotide sequences described herein are 2′-O-methyl nucleotides. In some embodiments, less than or equal to 25, 24, 23, 22, 21, 20, 19, 18, 17, 16, 15, 14, 13, 12, 11, 10, 9, 8, 7, 6, 5, 4, 3, or 2 modified nucleotides of any sense or antisense nucleotide sequences described herein are 2′-O-methyl nucleotides. In some embodiments, less than or equal to 21 modified nucleotides of any sense or antisense nucleotide sequences described herein are 2′-O-methyl nucleotides. In some embodiments, less than or equal to 20 modified nucleotides of any sense or antisense nucleotide sequences described herein are 2′-O-methyl nucleotides. In some embodiments, less than or equal to 19 modified nucleotides of any sense or antisense nucleotide sequences described herein are 2′-O-methyl nucleotides. In some embodiments, less than or equal to 18 modified nucleotides of any sense or antisense nucleotide sequences described herein are 2′-O-methyl nucleotides. In some embodiments, less than or equal to 17 modified nucleotides of any sense or antisense nucleotide sequences described herein are 2′-O-methyl nucleotides. In some embodiments, less than or equal to 16 modified nucleotides of any sense or antisense nucleotide sequences described herein are 2′-O-methyl nucleotides. In some embodiments, less than or equal to 15 modified nucleotides of any sense or antisense nucleotide sequences described herein are 2′-O-methyl nucleotides. In some embodiments, less than or equal to 14 modified nucleotides of any sense or antisense nucleotide sequences described herein are 2′-O-methyl nucleotides. In some embodiments, less than or equal to 13 modified nucleotides of any sense or antisense nucleotide sequences described herein are 2′-O-methyl nucleotides. In some embodiments, at least one modified nucleotide of any sense or antisense nucleotide sequences described herein is a 2′-O-methyl pyrimidine. In some embodiments, at least 5, 6, 7, 8, 9, or 10 modified nucleotides of any sense or antisense nucleotide sequences described herein are 2′-O-methyl pyrimidines. In some embodiments, at least one modified nucleotide of any sense or antisense nucleotide sequences described herein is a 2′-O-methyl purine. In some embodiments, at least 5, 6, 7, 8, 9, or 10 modified nucleotides of any sense or antisense nucleotide sequences described herein are 2′-O-methyl purines. In some embodiments, the 2′-O-methyl nucleotide is a 2′-O-methyl nucleotide mimic.

[0115] In some embodiments, the nucleotide at position 3, 5, 7, 8, 9, 10, 11, 12, 14, 17, and/or 19 from the 5′ end of any sense or antisense nucleotide sequences described herein is a 2′-fluoro nucleotide. In some embodiments, at least two nucleotides at positions 3, 5, 7, 8, 9, 10, 11, 12, 14, 17, and/or 19 from the 5′ end of any sense or antisense nucleotide sequences described herein are 2′-fluoro nucleotides. In some embodiments, at least three nucleotides at positions 3, 5, 7, 8, 9, 10, 11, 12, 14, 17, and/or 19 from the 5′ end of any sense or antisense nucleotide sequences described herein are 2′-fluoro nucleotides. In some embodiments, at least four nucleotides at positions 3, 5, 7, 8, 9, 10, 11, 12, 14, 17, and/or 19 from the 5′ end of any sense or antisense nucleotide sequences described herein are 2′-fluoro nucleotides. In some embodiments, at least five nucleotides at positions 3, 5, 7, 8, 9, 10, 11, 12, 14, 17, and/or 19 from the 5′ end of any sense or antisense nucleotide sequences described herein are 2′-fluoro nucleotides. In some embodiments, the nucleotides at positions 3, 5, 7, 8, 9, 10, 11, 12, 14, 17, and/or 19 from the 5′ end of any sense or antisense nucleotide sequences described herein are 2′-fluoro nucleotides. In some embodiments, the nucleotide at position 3 from the 5′ end of any sense or antisense nucleotide sequences described herein is a 2′-fluoro nucleotide. In some embodiments, the nucleotide at position 7 from the 5′ end of any sense or antisense nucleotide sequences described herein is a 2′-fluoro nucleotide. In some embodiments, the nucleotide at position 8 from the 5′ end of any sense or antisense nucleotide sequences described herein is a 2′-fluoro nucleotide. In some embodiments, the nucleotide at position 9 from the 5′ end of any sense or antisense nucleotide sequences described herein is a 2′-fluoro nucleotide. In some embodiments, the nucleotide at position 12 from the 5′ end of any sense or antisense nucleotide sequences described herein is a 2′-fluoro nucleotide. In some embodiments, the nucleotide at position 17 from the 5′ end of any sense or antisense nucleotide sequences described herein is a 2′-fluoro nucleotide. In some embodiments, the 2′-fluoro nucleotide is a 2′-fluoro nucleotide mimic.

[0116] In some embodiments, at least 1, 2, 3, 4, 5, 6, or 7 nucleotides at position 1, 3, 5, 7, 8, 9, 10, 11, 12, 14, 17, and/or 19 from the 5′ end of any sense or antisense nucleotide sequences described herein is a 2′-fluoro nucleotide. In some embodiments, the nucleotide at positions 1, 3, 5, 7, 8, 9, 10, 11, 12, 14, 17, and/or 19 from the 5′ end of any sense or antisense nucleotide sequences described herein is a 2′-fluoro nucleotide. In some embodiments, at least two nucleotides at positions 1, 3, 5, 7, 8, 9, 10, 11, 12, 14, 17, and/or 19 from the 5′ end of any sense or antisense nucleotide sequences described herein are 2′-fluoro nucleotides. In some embodiments, at least three nucleotides at positions 1, 3, 5, 7, 8, 9, 10, 11, 12, 14, 17, and/or 19 from the 5′ end of any sense or antisense nucleotide sequences described herein are 2′-fluoro nucleotides. In some embodiments, the nucleotides at positions 1, 3, 5, 7, 8, 9, 10, 11, 12, 14, 17, and/or 19 from the 5′ end of any sense or antisense nucleotide sequences described herein are 2′-fluoro nucleotides. In some embodiments, the 2′-fluoro nucleotide is a 2′-fluoro nucleotide mimic.

[0117] In some embodiments, at least 1, 2, 3, 4, 5, 6, or 7 nucleotides at position 2, 4, 6, 8, 10, 12, 14, 16, and/or 18 from the 5′ end of any sense or antisense nucleotide sequences described herein is a 2′-fluoro nucleotide. In some embodiments, the nucleotide at positions, 4, 6, 8, 10, 12, 14, 16, and/or 18 from the 5′ end of any sense or antisense nucleotide sequences described herein is a 2′-fluoro nucleotide. In some embodiments, at least two nucleotides at positions 2, 4, 6, 8, 10, 12, 14, 16, and/or 18 from the 5′ end of any sense or antisense nucleotide sequences described herein are 2′-fluoro nucleotides. In some embodiments, at least three nucleotides at positions 2, 4, 6, 8, 10, 12, 14, 16, and/or 18 from the 5′ end of any sense or antisense nucleotide sequences described herein are 2′-fluoro nucleotides. In some embodiments, the nucleotides at positions 2, 4, 6, 8, 10, 12, 14, 16, and/or 18 from the 5′ end of any sense or antisense nucleotide sequences described herein are 2′-fluoro nucleotides. In some embodiments, the 2′-fluoro nucleotide is a 2′-fluoro nucleotide mimic.

[0118] In some embodiments, the nucleotide at position 1 from the 5′ end of any sense nucleotide sequences described herein is a 2′-fluoro nucleotide. In some embodiments, the nucleotide at position 3 from the 5′ end of any sense nucleotide sequences described herein is a 2′-fluoro nucleotide. In some embodiments, the nucleotide at position 5 from the 5′ end of any sense nucleotide sequences described herein is a 2′-fluoro nucleotide. In some embodiments, the nucleotide at position 7 from the 5′ end of any sense nucleotide sequences described herein is a 2′-fluoro nucleotide. In some embodiments, the nucleotide at position 8 from the 5′ end of any sense nucleotide sequences described herein is a 2′-fluoro nucleotide. In some embodiments, the nucleotide at position 9 from the 5′ end of any sense nucleotide sequences described herein is a 2′-fluoro nucleotide. In some embodiments, the nucleotide at position 10 from the 5′ end of any sense nucleotide sequences described herein is a 2′-fluoro nucleotide. In some embodiments, the nucleotide at position 11 from the 5′ end of any sense nucleotide sequences described herein is a 2′-fluoro nucleotide. In some embodiments, the nucleotide at position 12 from the 5′ end of any sense nucleotide sequences described herein is a 2′-fluoro nucleotide. In some embodiments, the nucleotide at position 14 from the 5′ end of any sense nucleotide sequences described herein is a 2′-fluoro nucleotide. In some embodiments, the nucleotide at position 17 from the 5′ end of any sense nucleotide sequences described herein is a 2′-fluoro nucleotide. In some embodiments, the nucleotide at position 19 from the 5′ end of any sense nucleotide sequences described herein is a 2′-fluoro nucleotide. In some embodiments, the 2′-fluoro nucleotide is a 2′-fluoro nucleotide mimic.

[0119] In some embodiments, at least 1, 2, 3, 4, 5, 6, or 7 nucleotides at position 1, 3, 5, 7, 8, 9, 10, 11, 12, 14, 17, and/or 19 from the 5′ end of any sense nucleotide sequences described herein is a 2′-fluoro nucleotide. In some embodiments, the nucleotide at position 5, 7, 8, 9, 10, 11, 14, and/or 19 from the 5′ end of any sense nucleotide sequences described herein is a 2′-fluoro nucleotide. In some embodiments, the nucleotide at position 5, 7, 8, and/or 9 from the 5′ end of any sense nucleotide sequences described herein is a 2′-fluoro nucleotide. In some embodiments, the nucleotide at position 7, 9, 10, and/or 11 from the 5′ end of any sense or antisense nucleotide sequences described herein is a 2′-fluoro nucleotide. In some embodiments, the nucleotide at position 5, 9, 10, 11, 14, and/or 19 from the 5′ end of any sense nucleotide sequences described herein is a 2′-fluoro nucleotide. In some embodiments, the 2′-fluoro nucleotide is a 2′-fluoro nucleotide mimic.

[0120] In some embodiments, the nucleotide at position 2 from the 5′ end of any antisense nucleotide sequences described herein is a 2′-fluoro nucleotide. In some embodiments, the nucleotide at position 4 from the 5′ end of any antisense nucleotide sequences described herein is a 2′-fluoro nucleotide. In some embodiments, the nucleotide at position 6 from the 5′ end of any antisense nucleotide sequences described herein is a 2′-fluoro nucleotide. In some embodiments, the nucleotide at position 8 from the 5′ end of any antisense nucleotide sequences described herein is a 2′-fluoro nucleotide. In some embodiments, the nucleotide at position 10 from the 5′ end of any antisense nucleotide sequences described herein is a 2′-fluoro nucleotide. In some embodiments, the nucleotide at position 12 from the 5′ end of any antisense nucleotide sequences described herein is a 2′-fluoro nucleotide. In some embodiments, the nucleotide at position 14 from the 5′ end of any antisense nucleotide sequences described herein is a 2′-fluoro nucleotide. In some embodiments, the nucleotide at position 16 from the 5′ end of any antisense nucleotide sequences described herein is a 2′-fluoro nucleotide. In some embodiments, the nucleotide at position 18 from the 5′ end of any antisense nucleotide sequences described herein is a 2′-fluoro nucleotide. In some embodiments, the 2′-fluoro nucleotide is a 2′-fluoro nucleotide mimic.

[0121] In some embodiments, at least 1, 2, 3, 4, 5, 6, or 7 nucleotides at position 2, 4, 5, 6, 8, 10, 12, 14, 16, 17 and/or 18 from the 5′ end of any antisense nucleotide sequences described herein is a 2′-fluoro nucleotide. In some embodiments, the nucleotide at position 2, 5, 6, 8, 14, 16, and/or 17 from the 5′ end of any antisense nucleotide sequences described herein is a 2′-fluoro nucleotide. In some embodiments, the nucleotide at position 2, 6, 14, and/or 16 from the 5′ end of any antisense nucleotide sequences described herein is a 2′-fluoro nucleotide. In some embodiments, the nucleotide at position 2, and/or 14 from the 5′ end of any antisense nucleotide sequences described herein is a 2′-fluoro nucleotide. In some embodiments, the nucleotide at position 2, 5, 8, 14, and/or 17 from the 5′ end of any antisense nucleotide sequences described herein is a 2′-fluoro nucleotide. In some embodiments, the 2′-fluoro nucleotide is a 2′-fluoro nucleotide mimic.

[0122] In some embodiments, the 2′-fluoro or 2′-O-methyl nucleotide mimic is a nucleotide mimic of Formula (V):

[chemical structure]

wherein Rₓ is independently a nucleobase, aryl, heteroaryl, or H, Q¹ and Q² are independently S or O, R⁵ is independently —OCD₃, —F, or —OCH₃, and R⁶ and R⁷ are independently H, D, or CD₃. In some embodiments, the nucleobase is selected from thymine, cytosine, guanine, adenine, uracil, and an analogue or derivative thereof.

[0123] In some embodiments, the 2′-fluoro or 2′-O-methyl nucleotide mimic is a nucleotide mimic of Formula (16)-Formula (20):

[chemical structure]

wherein Rₓ is independently a nucleobase and R² is F or —OCH₃. In some embodiments, the nucleobase is selected from thymine, cytosine, guanine, adenine, uracil, and an analogue or derivative thereof.

[0124] In some embodiments, the sense strand or the antisense strand may comprise at least 1, at least 2, at least 3, at least 4, or at least 5 or more modified nucleotide(s) having the following chemical structure:

[chemical structure]

wherein Rₓ is a nucleobase, aryl, heteroaryl, or H. In some embodiments, the nucleobase is selected from thymine, cytosine, guanine, adenine, uracil, and an analogue or derivative thereof.

[0125] In some embodiments, the sense strand or the antisense strand may comprise at least 1, at least 2, at least 3, at least 4, or at least 5 or more modified nucleotide(s) having the following chemical structure:

[chemical structure]

wherein Rₓ is a nucleobase. In some embodiments, the nucleobase is selected from thymine, cytosine, guanine, adenine, uracil, and an analogue or derivative thereof.

[0126] In some embodiments, the sense strand or the antisense strand may comprise at least 1, at least 2, at least 3, at least 4, or at least 5 or more modified nucleotide(s) having the following chemical structure:

[chemical structure]

[chemical structure]

wherein B and Ry is a nucleobase. In some embodiments, the nucleobase is selected from thymine, cytosine, guanine, adenine, uracil, and an analogue or derivative thereof.

[0127] In some embodiments, any sense or antisense nucleotide sequence described herein comprises, consists of, or consists essentially of ribonucleic acids (RNAs). In some embodiments, any sense or antisense nucleotide sequence described herein comprises, consists of, or consists essentially of modified RNAs. In some embodiments, the modified RNAs are selected from a 2′-O-methyl RNA and 2′-fluoro RNA. In some embodiments, 15, 16, 17, 18, 19, 20, 21, 22, or 23 modified nucleotides of any sense or antisense nucleotide sequence described herein are independently selected from 2′-O-methyl RNA and 2′-fluoro RNA.

[0128] In some embodiments, the siRNA molecules disclosed herein include end modifications at the 5′ end and/or the 3′ end of the sense strand and/or the antisense strand. In some embodiments, the siRNA molecules disclosed herein comprise a phosphate moiety at the 5′ end of the sense strand and/or antisense strand. In some embodiments, the 5′ end of the sense strand and/or antisense strand comprises a phosphate mimic or analogue (e.g., “5′ terminal phosphate mimic”). In some embodiments, the 5′ end of the sense strand and/or antisense strand comprises a vinyl phosphonate or a variation thereof (e.g., “5′ terminal vinyl phosphonate”).

[0129] In some embodiments, the siRNA molecules comprise at least one backbone modification, such as a modified internucleoside linkage. In some embodiments, the siRNA molecules described herein comprise at least one phosphorothioate internucleoside linkage. In particular embodiments, the phosphorothioate internucleoside linkages may be positioned at the 3′ or 5′ ends of the sense and/or antisense strands.

[0130] In some embodiments, siRNA molecules include an overhang of at least one unpaired nucleotide. In some embodiments in which the siRNA molecule comprises a nucleotide overhang, two or more of the unpaired nucleotides in the overhang can be connected by a phosphorothioate internucleoside linkage. In certain embodiments, all the unpaired nucleotides in a nucleotide overhang at the 3′ end of the antisense strand and/or the sense strand are connected by phosphorothioate internucleoside linkages. In some embodiments, all the unpaired nucleotides in a nucleotide overhang at the 5′ end of the antisense strand and/or the sense strand are connected by phosphorothioate internucleoside linkages. In some embodiments, all of the unpaired nucleotides in any nucleotide overhang are connected by phosphorothioate internucleoside linkages.

[0131] In some embodiments, the sense or the antisense strand may further comprise at least 1, 2, 3, 4, 5, 6, 7, 8, 9, 10, 11, 12, 13, 14, or 15 or more phosphorothioate internucleoside linkages. In some embodiments, the sense strand comprises 20, 19, 18, 17, 16, 15, 14, 13, 12, 11, 10, 9, 8, 7, 6, 5, 4, or 3 or fewer phosphorothioate internucleoside linkages. In some embodiments, the sense strand comprises 2 to 10, 2 to 8, 2 to 6, 1 to 5, 1 to 4, 1 to 3, or 1 to 2 phosphorothioate internucleoside linkages. In some embodiments, the sense strand comprises 1 to 2 phosphorothioate internucleoside linkages. In some embodiments, the sense strand comprises 2 to 4 phosphorothioate internucleoside linkages. In some embodiments, at least one phosphorothioate internucleoside linkage is between the nucleotides at positions 1 and 2 from the 5′ end of any sense or antisense nucleotide sequences described herein. In some embodiments, at least one phosphorothioate internucleoside linkage is between the nucleotides at positions 2 and 3 from the 5′ end of any sense or antisense nucleotide sequences described herein. In some embodiments, the sense strand comprises two phosphorothioate internucleoside linkages between the nucleotides at positions 1 to 3 from the 5′ end of any sense or antisense nucleotide sequences described herein.

[0132] In some embodiments, the modified nucleotides that can be incorporated into the siRNA molecules of the disclosure may have more than one chemical modification described herein. For instance, in some embodiments, the modified nucleotide may have a modification to the ribose sugar as well as a modification to the phosphodiester backbone. By way of example, a modified nucleotide may comprise a 2′ sugar modification (e.g., 2′-fluoro or 2′-O-methyl) and a modification to the 5′ phosphate that would create a modified internucleoside linkage when the modified nucleotide was incorporated into a polynucleotide. For instance, in some embodiments, the modified nucleotide may comprise a sugar modification, such as a 2′-fluoro modification or a 2′-O-methyl modification, for example, as well as a 5′ phosphorothioate group. In some embodiments, the sense and/or antisense strand of the siRNA molecules of the disclosure comprises a combination of 2′ modified nucleotides and phosphorothioate internucleoside linkages. In some embodiments, the sense and/or antisense strand of the siRNA molecules of the disclosure comprises a combination of 2′ sugar modifications, phosphorothioate internucleoside linkages, and 5′ terminal vinyl phosphonate.

[0133] In some embodiments, any of the siRNAs disclosed herein comprise 1, 2, 3, 4, 5, 6, 7, 8, 9, 10, 11, 12, 13, 14, 15, 16, 17, 18, 19, 20, 21, 22, 23, 24, 25, or more modified nucleotides. In some embodiments, any of the siRNAs disclosed herein comprise 1 or more modified nucleotides. In some embodiments, any of the siRNAs disclosed herein comprise 2 or more modified nucleotides. In some embodiments, any of the siRNAs disclosed herein comprise 5 or more modified nucleotides. In some embodiments, any of the siRNAs disclosed herein comprise 8 or more modified nucleotides. In some embodiments, any of the siRNAs disclosed herein comprise 10 or more modified nucleotides. In some embodiments, any of the siRNAs disclosed herein comprise 15 or more modified nucleotides. In some embodiments, any of the siRNAs disclosed herein comprise 20 or more modified nucleotides. In some embodiments, any of the siRNAs disclosed herein comprise 30 or more modified nucleotides. In some embodiments, any of the siRNAs disclosed herein comprise 35 or more modified nucleotides. In some embodiments, any of the siRNAs disclosed herein comprise 40 or more modified nucleotides. In some embodiments, any of the siRNAs disclosed herein comprise 45 or more modified nucleotides. In some embodiments, all of the nucleotides in the siRNA molecule are modified nucleotides. In some embodiments, the one or more modified nucleotides is independently selected from a 2′-O-methyl nucleotide, a 2′-fluoro nucleotide, a locked nucleic acid, a nucleoside analog, a 5′ terminal vinyl phosphonate, and a 5′ phosphorothioate.

[0134] In some embodiments, any of the sense strands disclosed herein comprise 1, 2, 3, 4, 5, 6, 7, 8, 9, 10, 11, 12, 13, 14, 15, 16, 17, 18, 19, 20, 21, 22, 23, 24, 25, or more modified nucleotides. In some embodiments, any of the sense strands disclosed herein comprise 1 or more modified nucleotides. In some embodiments, any of the sense strands disclosed herein comprise 2 or more modified nucleotides. In some embodiments, any of the sense strands disclosed herein comprise 5 or more modified nucleotides. In some embodiments, any of the sense strands disclosed herein comprise 8 or more modified nucleotides. In some embodiments, any of the sense strands disclosed herein comprise 10 or more modified nucleotides. In some embodiments, any of the sense strands disclosed herein comprise 15 or more modified nucleotides. In some embodiments, any of the sense strands disclosed herein comprise 17 or more modified nucleotides. In some embodiments, any of the sense strands disclosed herein comprise 18 or more modified nucleotides. In some embodiments, any of the sense strands disclosed herein comprise 19 or more modified nucleotides. In some embodiments, any of the sense strands disclosed herein comprise 20 or more modified nucleotides. In some embodiments, any of the sense strands disclosed herein comprise 21 or more modified nucleotides. In some embodiments, all of the nucleotides in the sense strand are modified nucleotides. In some embodiments, the one or more modified nucleotides is independently selected from a 2′-O-methyl nucleotide, a 2′-fluoro nucleotide, a locked nucleic acid, a nucleoside analog, a 5′ terminal vinyl phosphonate, and a 5′ phosphorothioate.

[0135] In some embodiments, any of the antisense strands disclosed herein comprise 1, 2, 3, 4, 5, 6, 7, 8, 9, 10, 11, 12, 13, 14, 15, 16, 17, 18, 19, 20, 21, 22, 23, 24, 25, or more modified nucleotides. In some embodiments, any of the antisense strands disclosed herein comprise 1 or more modified nucleotides. In some embodiments, any of the antisense strands disclosed herein comprise 2 or more modified nucleotides. In some embodiments, any of the antisense strands disclosed herein comprise 5 or more modified nucleotides. In some embodiments, any of the antisense strands disclosed herein comprise 8 or more modified nucleotides. In some embodiments, any of the antisense strands disclosed herein comprise 10 or more modified nucleotides. In some embodiments, any of the antisense strands disclosed herein comprise 15 or more modified nucleotides. In some embodiments, any of the antisense strands disclosed herein comprise 17 or more modified nucleotides. In some embodiments, any of the antisense strands disclosed herein comprise 18 or more modified nucleotides. In some embodiments, any of the antisense strands disclosed herein comprise 19 or more modified nucleotides. In some embodiments, any of the antisense strands disclosed herein comprise 20 or more modified nucleotides. In some embodiments, any of the antisense strands disclosed herein comprise 21 or more modified nucleotides. In some embodiments, any of the antisense strands disclosed herein comprise 22 or more modified nucleotides. In some embodiments, any of the antisense strands disclosed herein comprise 23 or more modified nucleotides. In some embodiments, all of the nucleotides in the antisense strand are modified nucleotides. In some embodiments, the one or more modified nucleotides is independently selected from a 2′-O-methyl nucleotide, a 2′-fluoro nucleotide, a locked nucleic acid, a nucleoside analog, a 5′ terminal vinyl phosphonate, and a 5′ phosphorothioate.

[0136] In some embodiments, at least about 10%, 20%, 30%, 40%, 45%, 50%, 55%, 60%, 65%, 70%, 75%, 80%, 90%, 95%, or 100% of the nucleotides in any of the sense strands disclosed herein are modified nucleotides. In some embodiments, at least about 10% of the nucleotides in any of the sense strands disclosed herein are modified nucleotides. In some embodiments, at least about 30% of the nucleotides in any of the sense strands disclosed herein are modified nucleotides. In some embodiments, at least about 50% of the nucleotides in any of the sense strands disclosed herein are modified nucleotides. In some embodiments, at least about 60% of the nucleotides in any of the sense strands disclosed herein are modified nucleotides. In some embodiments, at least about 70% of the nucleotides in any of the sense strands disclosed herein are modified nucleotides. In some embodiments, at least about 80% of the nucleotides in any of the sense strands disclosed herein are modified nucleotides. In some embodiments, at least about 90% of the nucleotides in any of the sense strands disclosed herein are modified nucleotides. In some embodiments, at least about 100% of the nucleotides in any of the sense strands disclosed herein are modified nucleotides. In some embodiments, the one or more modified nucleotides is independently selected from a 2′-O-methyl nucleotide, a 2′-fluoro nucleotide, a locked nucleic acid, a nucleoside analog, a 5′ terminal vinyl phosphonate, and a 5′ phosphorothioate.

[0137] In some embodiments, at least about 10%, 20%, 30%, 40%, 45%, 50%, 55%, 60%, 65%, 70%, 75%, 80%, 90%, 95%, or 100% of the nucleotides in any of the antisense strands disclosed herein are modified nucleotides. In some embodiments, at least about 10% of the nucleotides in any of the antisense strands disclosed herein are modified nucleotides. In some embodiments, at least about 30% of the nucleotides in any of the antisense strands disclosed herein are modified nucleotides. In some embodiments, at least about 50% of the nucleotides in any of the antisense strands disclosed herein are modified nucleotides. In some embodiments, at least about 60% of the nucleotides in any of the antisense strands disclosed herein are modified nucleotides. In some embodiments, at least about 70% of the nucleotides in any of the antisense strands disclosed herein are modified nucleotides. In some embodiments, at least about 80% of the nucleotides in any of the antisense strands disclosed herein are modified nucleotides. In some embodiments, at least about 90% of the nucleotides in any of the antisense strands disclosed herein are modified nucleotides. In some embodiments, at least about 100% of the nucleotides in any of the antisense strands disclosed herein are modified nucleotides. In some embodiments, the one or more modified nucleotides is independently selected from a 2′-O-methyl nucleotide, a 2′-fluoro nucleotide, a locked nucleic acid, a nucleoside analog, a 5′ terminal vinyl phosphonate, and a 5′ phosphorothioate.

[0138] In some embodiments, the siRNA molecule comprises a sense strand comprising a nucleotide sequence of any one of SEQ ID NOs: 903-1484, 2148-2187, 2278-2301, 2326-2339 or 2354-2358. In some embodiments, the siRNA molecule comprises an antisense strand comprising a nucleotide sequence of any one of SEQ ID NOs: 1485-2066, 2188-2227, 2302-2325 or 2340-2353. In some embodiments, the siRNA molecule comprises a sense strand comprising a nucleotide sequence of any one of SEQ ID NOs: 903-1484, 2148-2187, 2278-2301, 2326-2339 or 2354-2358 and an antisense strand comprising a nucleotide sequence of any one of SEQ ID NOs: 1485-2066, 2188-2227, 2302-2325 or 2340-2353.

siRNA Conjugates

[0139] In some embodiments, the siRNA molecules disclosed herein may comprise one or more conjugates or ligands. As used herein, a “conjugate” or “ligand” refers to any compound or molecule that is capable of interacting with another compound or molecule, directly or indirectly. In some embodiments, the ligand may modify one or more properties of the siRNA molecule to which it is attached, such as the pharmacodynamic, pharmacokinetic, binding, absorption, cellular distribution, cellular uptake, charge and/or clearance properties of the siRNA molecule. Non-limiting examples of such conjugates are described, e.g., in WO 2020/243490; WO 2020/097342; WO 2021/119325; PCT/US2021/019629; PCT/US2021/019628; PCT/US2021/021199; Sig. Transduct. Target Ther. 5 (101), 2020; ACS Chem. Biol. 10 (5), 1181-1187, 2015; J. Am. Chem. Soc. 136 (49), 16958-16961, 2014; Nucleic Acids Res. 42 (13), 8796-8807, 2014; Molec. Ther. 28 (8), 1759-1771, 2020; and Nucleic Acid Ther. 28 (3), 109-118, 2018, each of which is incorporated by reference herein.

[0140] In some embodiments, the ligand may be attached to the 5′ end and/or the 3′ end of the sense and/or antisense strand of the siRNA via covalent attachment such as to a nucleotide. In some embodiments, the ligand is covalently attached via a linker to the sense or antisense strand of the siRNA molecule. The ligand can be attached to nucleobases, sugar moieties, or internucleoside linkages of polynucleotides (e.g., sense strand or antisense strand) of the siRNA molecules of the disclosure.

[0141] In some embodiments, the type of conjugate or ligand used and the extent of conjugation of siRNA molecules of the disclosure can be evaluated, for example, for improved pharmacokinetic profiles, bioavailability, and/or stability of siRNA molecules while at the same time maintaining the ability of the siRNA to mediate RNAi activity. In some embodiments, a conjugate or ligand alters the distribution, targeting or lifetime of a siRNA molecule into which it is incorporated. In some embodiments, a conjugate or ligand provides an enhanced affinity for a selected target, e.g., molecule, cell or cell type, compartment (e.g., a cellular or organ compartment), tissue, organ or region of the body, as, e.g., compared to a molecule absent such a ligand.

[0142] In some embodiments, a conjugate or ligand can include a naturally occurring substance or a recombinant or synthetic molecule. Non-limiting examples of conjugates and ligands include serum proteins (e.g., human serum albumin, low-density lipoprotein, globulin), cholesterol moieties, vitamins (e.g., biotin, vitamin E, vitamin B12), folate moieties, steroids, bile acids (e.g., cholic acid), fatty acids (e.g., palmitic acid, myristic acid), carbohydrates (e.g., a dextran, pullulan, chitin, chitosan, inulin, cyclodextrin, hyaluronic acid, or N-acetyl-galactosamine (GalNAc)), glycosides, phospholipids, antibodies or binding fragment thereof (e.g., antibody or binding fragment that targets the siRNA to a specific cell type, such as liver), a dyes, intercalating agents (e.g., acridines), cross-linkers (e.g., psoralene, mitomycin C), porphyrins (TPPC4, texaphyrin, Sapphyrin), polycyclic aromatic hydrocarbons (e.g., phenazine, dihydrophenazine), artificial endonucleases (e.g., EDTA), lipophilic molecules (e.g., cholesterol, tocopherol, long fatty acids (e.g., docosanoic, palmitoyl, docosahexaenoic), cholic acid, adamantane acetic acid, 1-pyrene butyric acid, dihydrotestosterone, 1,3-BisO(hexadecyl)glycerol, geranyloxyhexyl group, hexadecylglycerol, borneol, menthol, 1,3-propanediol, heptadecyl group, 03-(oleoyl)lithocholic acid, 03-(oleoyl)cholenic acid, dimethoxytrityl, or phenoxazine), peptides (e.g., antennapedia peptide, Tat peptide, RGD peptides), alkylating agents, polymers, such as polyethylene glycol (PEG) (e.g., PEG-40K), poly amino acids, polyamines (e.g., spermine, spermidine), alkyls, substituted alkyls, radiolabeled markers, enzymes, haptens (e.g., biotin), transport/absorption facilitators (e.g., aspirin, vitamin E, folic acid), synthetic ribonucleases (e.g., imidazole, bisimidazole, histamine, imidazole clusters, acridine-imidazole conjugates, Eu3+ complexes of tetraazamacrocycles), dinitrophenyl, HRP, or AP.

[0143] In some embodiments, the conjugate or ligand comprises a carbohydrate. Carbohydrates include, but are not limited to, sugars (e.g., monosaccharides, disaccharides, trisaccharides, tetrasaccharides, and oligosaccharides containing from about 4, 5, 6, 7, 8, or 9 monosaccharide units) and polysaccharides, such as starches, glycogen, cellulose and polysaccharide gums. In some embodiments, the carbohydrate incorporated into the ligand is a monosaccharide selected from a pentose, hexose, or heptose and di- and tri-saccharides including such monosaccharide units.

[0144] In some embodiments, the carbohydrate incorporated into the conjugate or ligand is an amino sugar, such as galactosamine, glucosamine, N-acetyl-galactosamine (GalNAc), and N-acetyl-glucosamine. In some embodiments, the conjugate or ligand comprises N-acetyl-galactosamine and derivatives thereof. Non-limiting examples of GalNAc- or galactose-containing ligands that can be incorporated into the siRNAs of the disclosure are described in WO 2020/243490; WO 2020/097342; WO 2021/119325; PCT/US2021/019629; PCT/US2021/019628; PCT/US2021/021199; Sig. Transduct. Target Ther. 5 (101), 1-25, 2020; ACS Chem. Biol. 10 (5), 1181-1187, 2015; J. Am. Chem. Soc. 136 (49), 16958-16961, 2014; Nucleic Acids Res. 42 (13), 8796-8807, 2014; Molec. Ther. 28 (8), 1759-1771, 2020; and Nucleic Acid Ther. 28 (3), 109-118, 2018, all of which are hereby incorporated herein by reference in their entireties.

[0145] The conjugate or ligand can be attached or conjugated to the siRNA molecule directly or indirectly. For instance, in some embodiments, the ligand is covalently attached directly to the sense or antisense strand of the siRNA molecule. In other embodiments, the ligand is covalently attached via a linker to the sense or antisense strand of the siRNA molecule. The ligand can be attached to nucleobases, sugar moieties, or internucleoside linkages of polynucleotides (e.g. sense strand or antisense strand) of the siRNA molecules of the disclosure. In some embodiments, the conjugate or ligand may be attached to the 5′ end and/or to the 3′ end of the sense and/or antisense strand of the siRNA molecule. In certain embodiments, the ligand is covalently attached to the 5′ end of the sense strand. In some embodiments, the ligand is covalently attached to the 3′ end of the sense strand. In some embodiments, the ligand is attached to the 5′ terminal nucleotide of the sense strand or the 3′ terminal nucleotide of the sense strand.

[0146] In some embodiments, the conjugate or ligand covalently attached to the sense and/or antisense strand of the siRNA molecule comprises a GalNAc derivative. In some embodiments, the GalNAc derivative is attached to the 5′ end and/or to the 3′ end of the sense and/or antisense strand of the siRNA molecule. In some embodiments, the GalNAc derivative is attached to the 3′ end of the sense strand. In some embodiments, the GalNAc derivative is attached to the 5′ end of the sense strand. In some embodiments, the GalNAc derivative is attached to the 3′ end of the antisense strand. In some embodiments, the GalNAc derivative is attached to the 5′ end of the antisense strand. In some embodiments, the GalNAc derivative is attached to the 5′ end of the sense strand and to the 3′ end of the sense strand.

[0147] In some embodiments, the conjugate or ligand is a GalNAc derivative comprising 1, 2, 3, 4, 5, or 6 monomeric GalNAc units. In some embodiments, the conjugate or ligand is a GalNAc derivative comprising 1 monomeric GalNAc units. In some embodiments, the conjugate or ligand is a GalNAc derivative comprising 2 monomeric GalNAc units. In some embodiments, the conjugate or ligand is a GalNAc derivative comprising 3 monomeric GalNAc units. In some embodiments, the conjugate or ligand is a GalNAc derivative comprising 4 monomeric GalNAc units. In some embodiments, the conjugate or ligand is a GalNAc derivative comprising 5 monomeric GalNAc units. In some embodiments, the conjugate or ligand is a GalNAc derivative comprising 6 monomeric GalNAc units. In some embodiments, a various amounts of monomeric GalNAc units are attached at the 5′ end and the 3′ end of the sense strand. In some embodiments, a various amounts of monomeric GalNAc units are attached at the 5′ end and the 3′ end of the antisense strand. In some embodiments, 1, 2, 3, 4, 5, or 6 monomeric GalNAc units are attached at the 5′ end of the sense strand. In some embodiments, 1, 2, 3, 4, 5, or 6 monomeric GalNAc units are attached at the 3′ end of the sense strand. In some embodiments, 1, 2, 3, 4, 5, or 6 monomeric GalNAc units are attached at the 5′ end of the antisense strand. In some embodiments, 1, 2, 3, 4, 5, or 6 monomeric GalNAc units are attached at the 3′ end of the antisense strand. In some embodiments, the same number of monomeric GalNAc units are attached at both the 5′ end and the 3′ end of the sense strand. In some embodiments, the same number of monomeric GalNAc units are attached at both the 5′ end and the 3′ end of the antisense strand. In some embodiments, different number of monomeric GalNAc units are attached at the 5′ end and the 3′ end of the sense strand. In some embodiments, different number of monomeric GalNAc units are attached at the 5′ end and the 3′ end of the antisense strand.

[0148] In some embodiments, the double stranded siRNA molecule of any one of siRNA Duplex ID Nos. D1-D515 or MD1-MD673, further comprises a GalNAc derivative attached to the 5′ end and/or to the 3′ end of the sense and/or antisense strand of the siRNA molecule. In some embodiments, the double stranded siRNA molecule selected from any one of the siRNA Duplexes of Table 1 or Table 2 or Table 3 or Table 4 further comprises a GalNAc derivative attached to the 5′ end and/or to the 3′ end of the sense and/or antisense strand of the siRNA molecule.

### PNPLA3

[0149] In some embodiments, any of the siRNAs disclosed herein specifically downregulate expression of PNPLA3 gene or a variant thereof. In some embodiments, any of the siRNAs disclosed herein specifically downregulate expression of PNPLA3 gene or a variant thereof in a cell by at least about 10%, 15%, 20%, 25%, 30%, 35%, 40%, 45%, 50%, 55%, 60%, 65%, 70%, 75%, 80%, 85%, 90%, 95%, or 100%, wherein the percent of downregulation of expression is compared to a cell not contacted with the siRNA. In some embodiments, any of the siRNAs disclosed herein specifically downregulate expression of PNPLA3 gene or a variant thereof in a cell by at least about 30%, wherein the percent of downregulation of expression is compared to a cell not contacted with the siRNA. In some embodiments, any of the siRNAs disclosed herein specifically downregulate expression of PNPLA3 gene or a variant thereof in a cell by at least about 50%, wherein the percent of downregulation of expression is compared to a cell not contacted with the siRNA. In some embodiments, any of the siRNAs disclosed herein specifically downregulate expression of PNPLA3 gene or a variant thereof in a cell by at least about 60%, wherein the percent of downregulation of expression is compared to a cell not contacted with the siRNA. In some embodiments, any of the siRNAs disclosed herein specifically downregulate expression of PNPLA3 gene or a variant thereof in a cell by at least about 70%, wherein the percent of downregulation of expression is compared to a cell not contacted with the siRNA. In some embodiments, any of the siRNAs disclosed herein specifically downregulate expression of PNPLA3 gene or a variant thereof in a cell by at least about 75%, wherein the percent of downregulation of expression is compared to a cell not contacted with the siRNA. In some embodiments, any of the siRNAs disclosed herein specifically downregulate expression of PNPLA3 gene or a variant thereof in a cell by at least about 80%, wherein the percent of downregulation of expression is compared to a cell not contacted with the siRNA. In some embodiments, any of the siRNAs disclosed herein specifically downregulate expression of PNPLA3 gene or a variant thereof in a cell by at least about 85%, wherein the percent of downregulation of expression is compared to a cell not contacted with the siRNA. In some embodiments, any of the siRNAs disclosed herein specifically downregulate expression of PNPLA3 gene or a variant thereof in a cell by at least about 90%, wherein the percent of downregulation of expression is compared to a cell not contacted with the siRNA. In some embodiments, any of the siRNAs disclosed herein specifically downregulate expression of PNPLA3 gene or a variant thereof in a cell by at least about 95%, wherein the percent of downregulation of expression is compared to a cell not contacted with the siRNA. In some embodiments, any of the siRNAs disclosed herein specifically downregulate expression of PNPLA3 gene or a variant thereof in a cell by at least about 100%, wherein the percent of downregulation of expression is compared to a cell not contacted with the siRNA.

[0150] The expression of PNPLA3 gene is measured by any method known in the art. Exemplary methods for measuring expression of PNPLA3 gene include, but are not limited to, quantitative PCR, RT-PCR, RT-qPCR, western blot, Southern blot, northern blot, FISH, DNA microarray, tiling array, and RNA-Seq. The expression of the PNPLA3 gene may be assessed, for example, based on the level, or the change in the level, of any variable associated with PNPLA3 gene expression, e.g., PNPLA3 mRNA level, PNPLA3 protein level, and/or the number or extent of amyloid deposits. This level may be assessed, for example, in an individual cell or in a group of cells, including, for example, a sample derived from a subject. In some embodiments, downregulation or inhibition may be assessed by a decrease in an absolute or relative level of one or more variables that are associated with PNPLA3 expression compared with a control level. The control level may be any type of control level that is utilized in the art, e.g., a pre-dose baseline level, or a level determined from a similar subject, cell, or sample that is untreated or treated with a control (such as, e.g., buffer only control or inactive or attenuated agent control).

[0151] In some embodiments, the PNPLA3 gene comprises a nucleotide sequence that is at least about 80%, 85%, 90%, 91%, 92%, 93%, 94%, 95%, 96%, 97%, 98%, 99%, or 100% identical to the nucleotide sequence of SEQ ID NO: 1 across the full-length of SEQ ID NO: 1 (PNPLA3 wild-type CDS (NCBI Ref. No. NM_025225.3)).

[0152] In some embodiments, the PNPLA3 gene comprises a nucleotide sequence having less than or equal to 1, 2, 3, 4, 5, 6, 7, 8, 9, 10, 11, 12, 13, 14, 15, 16, 17, 18, 19, or 20 nucleotide mismatches to the nucleotide sequence of SEQ ID NO: 1 across the full-length of SEQ ID NO: 1. In some embodiments, the PNPLA3 gene comprises a nucleotide sequence having a single nucleotide missense mutation at position 444 of the nucleotide sequence of SEQ ID NO: 1 (i.e., SEQ ID NO: 2067).

[0153] In some embodiments, the PNPLA3 gene comprises a nucleotide sequence encoding a PNPLA3 protein having an amino acid sequence that is at least about 80%, 85%, 90%, 91%, 92%, 93%, ₉₄%, 95%, 96%, 97%, 98%, 99%, or 100% identical to the amino acid sequence of SEQ ID NO: 2 across the full-length of SEQ ID NO: 2 (PNPLA3 wild-type protein (NCBI Ref. No. NM_079501.2)).

[0154] In some embodiments, the PNPLA3 gene comprises a nucleotide sequence encoding a PNPLA3 protein having an amino acid sequence having less than or equal to 1, 2, 3, 4, 5, 6, 7, 8, 9, 10, 11, 12, 13, 14, 15, 16, 17, 18, 19, or 20 substitutions, deletions, or insertions to the amino acid sequence of SEQ ID NO: 2 across the full-length of SEQ ID NO: 2. In some embodiments, the PNPLA3 gene comprises a nucleotide sequence encoding a PNPLA3 protein having an amino acid sequence having a substitution at position 148 of the amino acid sequence of SEQ ID NO: 2. In some embodiments, the substitution at position 148 is an I148M substitution.

[0155] In some embodiments, the fragment of the PNPLA3 gene is about 10 to about 50, or about 15 to about 50, or about 15 to about 45 nucleotides, or about 15 to about 40, or about 15 to about 35, or about 15 to about 30, or about 15 to about 25, or about 17 to about 23 nucleotides, or about 17 to about 22, or about 17 to about 21, or about 18 to about 23, or about 18 to about 22, or about 18 to about 21, or about 19 to about 23, or about 19 to about 22, or about 19 to about 21 nucleotides in length. In some embodiments, the fragment of the PNPLA3 gene spans a region of the PNPLA3 gene containing the nucleotide at position 444 of SEQ ID NO: 1 or spans a region within 100, 200, 300, 400, or 500 nucleotides of position 444 of SEQ ID NO: 1. In some embodiments, the nucleotide at position 444 of SEQ ID NO: 1 contains a C to G substitution (SEQ ID NO: 2067).

[0156] In some embodiments, the antisense strand is complementary to the fragment of the PNPLA3 gene containing a C to G substitution at position 444 of SEQ ID NO: 1 (i.e., SEQ ID NO: 2067). In some embodiments, the antisense strand is complementary to the fragment of the PNPLA3 gene that is within 100, 200, 300, 400, or 500 nucleotides of position 444 of SEQ ID NO: 1.

Administration of siRNA

[0157] Administration of any of the siRNAs disclosed herein may be conducted by methods known in the art, including as described below. The siRNAs of the present disclosure may be given systemically or locally, for example, orally, nasally, parenterally, topically, intracisternally, intravaginally, or rectally, and are given in forms suitable for each administration route.

[0158] The delivery of a siRNA molecule of the disclosure to a cell, e.g., a cell within a subject, such as a human subject (e.g., a subject in need thereof, including a subject having a disease, disorder or condition associated with PNPLA3 gene expression) can be achieved in a number of different ways. For example, in some embodiments, delivery may be performed by contacting a cell with a siRNA of the disclosure either in vitro, in vivo, or ex vivo. In some embodiments, in vivo delivery may be performed, for example, by administering a pharmaceutical composition comprising a siRNA molecule to a subject. In some embodiments, in vivo delivery may be performed by administering one or more vectors that encode and direct the expression of the siRNA.

[0159] In general, any method of delivering a nucleic acid molecule (in vitro, in vivo, or ex vivo) can be adapted for use with a siRNA molecule of the disclosure. For in vivo delivery, factors to consider in order to deliver a siRNA molecule include, for example, biological stability of the delivered molecule, prevention of non-specific effects, and accumulation of the delivered molecule in the target tissue and non-target tissue.

[0160] In some embodiments, the non-specific effects of a siRNA can be minimized by local administration, for example, by direct injection or implantation into a tissue or topically administering the preparation. Local administration to a treatment site can, for example, maximize the local concentration of the agent, limit the exposure of the agent to systemic tissues that can otherwise be harmed by the agent or that can degrade the agent, and permit a lower total dose of the siRNA molecule to be administered.

[0161] In some embodiments, the siRNAs or pharmaceutical compositions comprising the siRNAs of the disclosure can be locally administered to relevant tissues ex vivo, or in vivo through, for example, injection, infusion pump or stent, with or without their incorporation in biopolymers.

[0162] For administering a siRNA for the treatment of a disease, the siRNA can be modified or alternatively delivered using a drug delivery system; both methods can act, for example, to prevent the rapid degradation of the dsRNA by endo- and exo-nucleases in vivo. Modification of the siRNA or the pharmaceutical carrier can also permit targeting of the siRNA composition to the target tissue and avoid undesirable off-target effects. For example, siRNA molecules can be modified by conjugation to lipophilic groups such as cholesterol as described above to, e.g., enhance cellular uptake and prevent degradation.

[0163] In some embodiments, the siRNA can be delivered using drug delivery systems such as a nanoparticle, a dendrimer, a polymer, liposomes, or a cationic delivery system. Positively charged cationic delivery systems can facilitate binding of a siRNA molecule (negatively charged) and also enhance interactions at the negatively charged cell membrane to permit efficient uptake of a siRNA by the cell. In some embodiments, cationic lipids, dendrimers, or polymers can either be bound to a siRNA, or induced to form a vesicle or micelle that encases a siRNA. The formation of vesicles or micelles may further prevent degradation of the siRNA when administered systemically, for example.

[0164] Some non-limiting examples of drug delivery systems useful for systemic delivery of siRNAs include DOTAP, cardiolipin, polyethyleneimine, Arg-Gly-Asp (RGD) peptides, and polyamidoamines. In some embodiments, a siRNA forms a complex with cyclodextrin for systemic administration.

### Pharmaceutical Compositions

[0165] The siRNA molecules of the disclosure can be administered to animals, including to mammals, and in particular to humans, as pharmaceuticals by themselves, in mixtures with one another, and/or in the form of pharmaceutical compositions.

[0166] The present disclosure includes pharmaceutical compositions and formulations which include the siRNA molecules of the disclosure. In some embodiments, a siRNA molecule of the disclosure may be administered in a pharmaceutical composition. In some embodiments, the pharmaceutical compositions of the disclosure comprise one or more siRNA molecules of the disclosure and a pharmaceutically acceptable carrier. When reference is made in the present disclosure to a siRNA molecule, it is to be understood that reference is also made to a pharmaceutical composition containing the siRNA molecule, if appropriate.

[0167] In some embodiments, the pharmaceutical composition comprises at least 1, 2, 3, 4, 5, 6, 7, 8, 9, 10, 11, 12, 13, 14, 15, 16, 17, 18, 19, or 20 or more of any of the siRNA molecules disclosed herein.

[0168] In some embodiments, any of the pharmaceutical compositions disclosed herein comprise one or more excipients, carriers, wetting agents, diluents, emulsifiers, lubricants, coloring agents, release agents, coating agents, sweetening, flavoring and perfuming agents, preservatives and antioxidants.

[0169] In some embodiments, a siRNA molecule of the disclosure may be administered in “naked” form, where the modified or unmodified siRNA molecule is directly suspended in aqueous or suitable buffer solvent, as a “free siRNA.” The free siRNA may be in a suitable buffer solution, which may comprise, for example, acetate, citrate, prolamine, carbonate, or phosphate, or any combination thereof. In one embodiment, the buffer solution is phosphate buffered saline (PBS). The pH and osmolality of the buffer solution containing the siRNA can be adjusted such that it is suitable for administering to a subject.

[0170] Examples of pharmaceutically-acceptable antioxidants include, but are not limited to: (1) water soluble antioxidants, such as ascorbic acid, cysteine hydrochloride, sodium bisulfate, sodium metabisulfite, sodium sulfite and the like; (2) oil-soluble antioxidants, such as ascorbyl palmitate, butylated hydroxyanisole (BHA), butylated hydroxytoluene (BHT), lecithin, propyl gallate, alpha-tocopherol, and the like; and (3) metal chelating agents, such as citric acid, ethylenediamine tetraacetic acid (EDTA), sorbitol, tartaric acid, phosphoric acid, and the like.

[0171] In certain embodiments, a pharmaceutical composition of the present disclosure comprises an excipient selected from the group consisting of cyclodextrins, celluloses, liposomes, micelle forming agents, e.g., bile acids, and polymeric carriers, e.g., polyesters and polyanhydrides; and a compound (e.g., siRNA molecule) of the present disclosure. In certain embodiments, an aforementioned composition renders orally bioavailable a siRNA molecule of the present disclosure.

[0172] Methods of preparing these formulations or pharmaceutical compositions include, for example, the step of bringing into association a siRNA molecule of the present disclosure with the carrier and, optionally, one or more accessory ingredients. In general, the formulations are prepared by uniformly and intimately bringing into association a siRNA molecule of the present disclosure with liquid carriers, or finely divided solid carriers, or both, and then, if necessary, shaping the product.

[0173] Administration of the pharmaceutical compositions of the present disclosure may be via any common route, and they are given in forms suitable for each administration route. Such routes include, but are not limited to, parenteral (e.g., subcutaneous, intramuscular, intraperitoneal or intravenous), oral, nasal, airway (e.g., aerosol), buccal, intradermal, transdermal, sublingual, rectal, and vaginal. In some embodiments, administration is by direct injection into liver tissue or delivery through the hepatic portal vein. In some embodiments, the pharmaceutical composition is administered orally. In some embodiments, the pharmaceutical composition is administered parenterally. In some embodiments, the compositions are administered by subcutaneous or intravenous infusion or injection. In some embodiments, the pharmaceutical composition is administered subcutaneously.

[0174] Pharmaceutical compositions of the disclosure suitable for oral administration may be, for example, in the form of capsules (e.g., hard or soft capsules), cachets, pills, tablets, lozenges (using a flavored basis, usually, e.g., sucrose and acacia or tragacanth), powders, granules, or as a solution or a suspension in an aqueous or non-aqueous liquid, or as an oil-in-water or water-in-oil liquid emulsion, or as an elixir or syrup, or as pastilles (using an inert base, such as gelatin and glycerin, or sucrose and acacia) and/or as mouth washes and the like, each containing a predetermined amount of a siRNA molecule of the present disclosure as an active ingredient. A siRNA molecule of the present disclosure may also be administered as a bolus, electuary or paste.

[0175] In solid dosage forms of the disclosure for oral administration (capsules, tablets, pills, dragees, powders, granules, trouches and the like), the active ingredient is mixed with one or more pharmaceutically-acceptable carriers, such as, for example, sodium citrate or dicalcium phosphate, and/or any of the following: (1) fillers or extenders, such as starches, lactose, sucrose, glucose, mannitol, and/or silicic acid; (2) binders, such as, for example, carboxymethylcellulose, alginates, gelatin, polyvinyl pyrrolidone, sucrose and/or acacia; (3) humectants, such as glycerol; (4) disintegrating agents, such as agar-agar, calcium carbonate, potato or tapioca starch, alginic acid, certain silicates, and sodium carbonate; (5) solution retarding agents, such as paraffin; (6) absorption accelerators, such as quaternary ammonium compounds and surfactants, such as poloxamer and sodium lauryl sulfate; (7) wetting agents, such as, for example, cetyl alcohol, glycerol monostearate, and non-ionic surfactants; (8) absorbents, such as kaolin and bentonite clay; (9) lubricants, such as talc, calcium stearate, magnesium stearate, solid polyethylene glycols, sodium lauryl sulfate, zinc stearate, sodium stearate, stearic acid, and mixtures thereof; (10) coloring agents; and (11) controlled release agents such as crospovidone or ethyl cellulose.

[0176] In the case of capsules, tablets and pills, the pharmaceutical compositions may also comprise buffering agents. Solid compositions of a similar type may also be employed as fillers in soft and hard-shelled gelatin capsules using such excipients as lactose or milk sugars, as well as high molecular weight polyethylene glycols and the like.

[0177] A tablet may be made, for example, by compression or molding, optionally with one or more accessory ingredients. Compressed tablets may be prepared, for example, using binder (for example, gelatin or hydroxypropylmethyl cellulose), lubricant, inert diluent, preservative, disintegrant (for example, sodium starch glycolate or cross-linked sodium carboxymethyl cellulose), surface-active or dispersing agent. Molded tablets may be made, for example, by molding in a suitable machine a mixture of the powdered compound moistened with an inert liquid diluent.

[0178] The tablets, and other solid dosage forms of the pharmaceutical compositions of the present disclosure, such as dragees, capsules, pills and granules, may optionally be scored or prepared with coatings and shells, such as enteric coatings and other coatings well known in the pharmaceutical-formulating art. They may also be formulated so as to provide slow or controlled release of the active ingredient therein using, for example, hydroxypropylmethyl cellulose in varying proportions to provide the desired release profile, other polymer matrices, liposomes and/or microspheres. They may be formulated for rapid release, e.g., freeze-dried.

[0179] They may be sterilized by, for example, filtration through a bacteria-retaining filter, or by incorporating sterilizing agents in the form of sterile solid compositions which can be dissolved in sterile water, or some other sterile injectable medium immediately before use. These compositions may also optionally contain opacifying agents and may be of a composition that they release the active ingredient(s) only, or preferentially, in a certain portion of the gastrointestinal tract, optionally, in a delayed manner. Examples of embedding compositions which can be used include polymeric substances and waxes. The active ingredient can also be in micro-encapsulated form, if appropriate, with one or more of the above-described excipients.

[0180] Liquid dosage forms for oral administration of the siRNA molecules of the disclosure include, for example, pharmaceutically acceptable emulsions, microemulsions, solutions, suspensions, syrups and elixirs. In addition to the active ingredient, the liquid dosage forms may contain inert diluents commonly used in the art, such as, for example, water or other solvents, solubilizing agents and emulsifiers, such as ethyl alcohol, isopropyl alcohol, ethyl carbonate, ethyl acetate, benzyl alcohol, benzyl benzoate, propylene glycol, 1,3-butylene glycol, oils (e.g., cottonseed, groundnut, corn, germ, olive, castor and sesame oils), glycerol, tetrahydrofuryl alcohol, polyethylene glycols and fatty acid esters of sorbitan, and mixtures thereof.

[0181] Besides inert diluents, the oral compositions can also include adjuvants such as, for example, wetting agents, emulsifying and suspending agents, sweetening, flavoring, coloring, perfuming and preservative agents.

[0182] Suspensions, in addition to the siRNA molecules, may contain suspending agents as, for example, ethoxylated isostearyl alcohols, polyoxyethylene sorbitol and sorbitan esters, microcrystalline cellulose, aluminum metahydroxide, bentonite, agar-agar and tragacanth, and mixtures thereof.

[0183] Formulations of the pharmaceutical compositions of the disclosure for rectal or vaginal administration may be presented as a suppository, which may be prepared by mixing one or more siRNA molecules of the disclosure with one or more suitable nonirritating excipients or carriers comprising, for example, cocoa butter, polyethylene glycol, a suppository wax or a salicylate, and which, for example, is solid at room temperature, but liquid at body temperature and, therefore, will melt in the rectum or vaginal cavity and release the siRNA molecule.

[0184] Formulations of the present disclosure which are suitable for vaginal administration also include, for example, pessaries, tampons, creams, gels, pastes, foams or spray formulations containing such carriers as are known in the art to be appropriate.

[0185] Dosage forms for the topical or transdermal administration of a siRNA molecule of this disclosure include, for example, powders, sprays, ointments, pastes, creams, lotions, gels, solutions, patches and inhalants. The siRNA molecule may be mixed under sterile conditions with a pharmaceutically acceptable carrier, and with any preservatives, buffers, or propellants which may be required.

[0186] The ointments, pastes, creams and gels may contain, in addition to an active siRNA molecule of this disclosure, excipients, such as, for example, animal and vegetable fats, oils, waxes, paraffins, starch, tragacanth, cellulose derivatives, polyethylene glycols, silicones, bentonites, silicic acid, talc and zinc oxide, or mixtures thereof.

[0187] Powders and sprays can contain, in addition to a siRNA molecule of this disclosure, excipients such as, for example, lactose, talc, silicic acid, aluminum hydroxide, calcium silicates and polyamide powder, or mixtures of these substances. Sprays can additionally contain customary propellants, such as, for example, chlorofluorohydrocarbons and volatile unsubstituted hydrocarbons, such as butane and propane.

[0188] Transdermal patches have the added advantage of providing controlled delivery of a siRNA molecule) of the present disclosure to the body. Such dosage forms can be made by dissolving or dispersing the siRNA molecule in the proper medium. Absorption enhancers can also be used to increase the flux of the siRNA molecule across the skin. The rate of such flux can be controlled, for example, by either providing a rate controlling membrane or dispersing the siRNA molecule in a polymer matrix or gel.

[0189] Pharmaceutical compositions of this disclosure suitable for parenteral administration comprise one or more siRNA molecules of the disclosure in combination with one or more pharmaceutically-acceptable sterile isotonic aqueous or nonaqueous solutions, dispersions, suspensions or emulsions, or sterile powders which may be reconstituted into sterile injectable solutions or dispersions just prior to use, which may contain, for example, sugars, alcohols, antioxidants, buffers, bacteriostats, solutes which render the formulation isotonic with the blood of the intended recipient or suspending or thickening agents.

[0190] Examples of suitable aqueous and nonaqueous carriers which may be employed in the pharmaceutical compositions of the disclosure include water, ethanol, polyols (such as glycerol, propylene glycol, polyethylene glycol, and the like), and suitable mixtures thereof, vegetable oils, such as olive oil, and injectable organic esters, such as ethyl oleate. Proper fluidity can be maintained, for example, by the use of coating materials, such as lecithin, by the maintenance of the required particle size in the case of dispersions, and by the use of surfactants.

[0191] The pharmaceutical compositions of the disclosure may also contain adjuvants such as preservatives, wetting agents, emulsifying agents and dispersing agents. Prevention of the action of microorganisms upon the subject compounds may be ensured, for example, by the inclusion of various antibacterial and antifungal agents, for example, paraben, chlorobutanol, phenol sorbic acid, and the like. It may also be desirable to include isotonic agents, such as sugars, sodium chloride, and the like into the compositions. In addition, prolonged absorption of the injectable pharmaceutical form may be brought about, for example, by the inclusion of agents which delay absorption such as aluminum monostearate and gelatin.

[0192] In some embodiments, in order to prolong the effect of a drug, it is desirable to slow the absorption of the drug, for example from subcutaneous or intramuscular injection. This may be accomplished, for example, by the use of a liquid suspension of crystalline or amorphous material having poor water solubility. The rate of absorption of the drug then depends upon its rate of dissolution which, in turn, may depend upon crystal size and crystalline form. Alternatively, delayed absorption of a parenterally-administered drug form is accomplished by dissolving or suspending the drug in an oil vehicle.

[0193] In some embodiments, the administration is via a depot injection. Injectable depot forms can be made by forming microencapsule matrices of the subject siRNA molecules in biodegradable polymers such as polylactide-polyglycolide. Depending on the ratio of drug to polymer, and the nature of the particular polymer employed, the rate of drug release can be controlled. Examples of other biodegradable polymers include poly(orthoesters) and poly(anhydrides). Depot injectable formulations can also be prepared, for example, by entrapping the drug in liposomes or microemulsions which are compatible with body tissue.

[0194] Depot injection may release the siRNA in a consistent way over a prolonged time period. Thus, a depot injection may reduce the frequency of dosing needed to obtain a desired effect, e.g., a desired inhibition of PNPLA3, or a therapeutic or prophylactic effect. A depot injection may also provide more consistent serum concentrations. Depot injections may include, for example, subcutaneous injections or intramuscular injections. In some embodiments, the depot injection is a subcutaneous injection.

[0195] In some embodiments, the administration is via a pump. The pump may be an external pump or a surgically implanted pump. In certain embodiments, the pump is a subcutaneously implanted osmotic pump. In other embodiments, the pump is an infusion pump. An infusion pump may be used, for example, for intravenous, subcutaneous, arterial, or epidural infusions. In some embodiments, the infusion pump is a subcutaneous infusion pump. In other embodiments, the pump is a surgically implanted pump that delivers the siRNA to the subject.

[0196] In some embodiments, the pharmaceutical compositions of the disclosure are packaged with or stored within a device for administration. Devices for injectable formulations include, but are not limited to, injection ports, pre-filled syringes, auto injectors, injection pumps, on-body injectors, and injection pens. Devices for aerosolized or powder formulations include, but are not limited to, inhalers, insufflators, aspirators, and the like. Thus, the present disclosure includes administration devices comprising a pharmaceutical composition of the disclosure for treating or preventing one or more of the disorders described herein.

[0197] The mode of administration may be chosen, for example, based upon whether local or systemic treatment is desired and based upon the area to be treated. The route and site of administration may be chosen, for example, to enhance targeting.

[0198] Regardless of the route of administration selected, the siRNA molecules of the present disclosure, which may be used in a suitable hydrated form, and/or the pharmaceutical compositions of the present disclosure, may be formulated into pharmaceutically-acceptable dosage forms by methods known to those of skill in the art. Methods for the formulation of pharmaceutical compositions depend on a number of criteria, including, but not limited to, route of administration, type and extent of disease or disorder to be treated, and/or dose to be administered. In some embodiments, the pharmaceutical compositions are formulated based on the intended route of delivery. The preparation of the pharmaceutical compositions can be carried out in a known manner. For this purpose, one or more compounds, together with one or more solid or liquid pharmaceutical carrier substances and/or additives (or auxiliary substances) and, if desired, in combination with other pharmaceutically active compounds having therapeutic or prophylactic action, are brought into a suitable administration form or dosage.

[0199] The pharmaceutical compositions may conveniently be presented in unit dosage form and may be prepared by any methods known in the art of pharmacy. The amount of active ingredient which can be combined with a carrier material to produce a single dosage form will vary depending upon the host being treated and the particular mode of administration, for example, as described below. The amount of active ingredient which can be combined with a carrier material to produce a single dosage form will generally be, for example, that amount of the siRNA molecule which produces a therapeutic effect. In some embodiments, for example, out of one hundred percent, this amount will range from about 0.1 percent to about ninety-nine percent of active ingredient, or from about 5 percent to about 70 percent, or from about 10 percent to about 30 percent.

[0200] Actual dosage levels of the active ingredients in the pharmaceutical compositions of this disclosure may be varied so as to obtain an amount of the active ingredient which is effective to achieve the desired therapeutic response for a particular patient, composition, and mode of administration, without being toxic to the patient. For example, the siRNA molecules in the pharmaceutical compositions of the disclosure may be administered in dosages sufficient to downregulate the expression of a PNPLA3 gene.

[0201] The siRNA molecules and pharmaceutical compositions of the present disclosure may be used to treat a disease in a subject in need thereof, for example in the methods described below.

### Dosages

[0202] The dosage amount and/or regimen utilizing a siRNA molecule of the disclosure may be selected in accordance with a variety of factors including, for example, the activity of the particular siRNA molecule of the present disclosure employed, or the salt thereof; the severity of the condition to be treated; the route of administration; the time of administration; the rate of excretion or metabolism of the particular siRNA molecule being employed; the rate and extent of absorption; the duration of the treatment; other drugs, compounds and/or materials used in combination with the particular siRNA molecule employed; the type, species, age, sex, weight, condition, general health and prior medical history of the patient being treated; the renal and hepatic function of the patient; and like factors well known in the medical arts. A consideration of these factors is well within the purview of the ordinarily skilled clinician for the purpose of determining a therapeutically effective amount.

[0203] In some embodiments, a suitable daily dose of a siRNA molecule of the disclosure is, for example, the amount of the siRNA molecule that is the lowest dose effective to produce a therapeutic effect. For example, a physician or veterinarian could start doses of the siRNA molecules of the disclosure employed in a pharmaceutical composition at levels lower than that required in order to achieve the desired therapeutic effect and gradually increase the dosage until the desired effect is achieved. Such an effective dose may depend, for example, upon the factors described above. In some embodiments, the siRNA molecules of the disclosure may be administered in dosages sufficient to downregulate or inhibit expression of a PNPLA3 gene.

[0204] In some embodiments, the siRNA molecule is administered at about 0.01 mg/kg to about 200 mg/kg, or at about 0.1 mg/kg to about 100 mg/kg, or at about 0.5 mg/kg to about 50 mg/kg. In some embodiments, the siRNA molecule is administered at about 1 mg/kg to about 40 mg/kg, or at about 1 mg/kg to about 30 mg/kg, or at about 1 mg/kg to about 20 mg/kg, or at about 1 mg/kg to about 15 mg/kg, or at about 1 mg/kg to about 10 mg/kg. In some embodiments, the siRNA molecule is administered at a dose equal to or greater than 0.01, 0.02, 0.03, 0.04, 0.05, 0.06, 0.07, 0.08, 0.09, 0.10, 0.11, 0.12, 0.13, 0.14, 0.15, 0.16, 0.17, 0.18, 0.19, 0.20, 0.21, 0.22, 0.23, 0.24, 0.25, 0.26, 0.27, 0.28, 0.29, 0.30, 0.35, 0.40, 0.45, 0.50, 0.55, 0.60, 0.65, 0.70, 0.75, 0.80, 0.85, 0.90, 0.95, or 1 mg/kg. In some embodiments, the siRNA molecule is administered at a dose equal to or greater than 1, 2, 3, 4, 5, 6, 7, 8, 9, 10, 11, 12, 13, 14, 15, 16, 17, 18, 19, 20, 21, 22, 23, 24, 25, 26, 27, 28, 29, or 30 mg/kg. In some embodiments, the siRNA molecule is administered at a dose equal to or less than 200, 190, 180, 170, 160, 150, 140, 130, 120, 110, 100, 95, 90, 85, 80, 75, 70, 65, 60, 55, 50, 45, 40, 35, 30, 25, 20, or 15 mg/kg. In some embodiments, the total daily dose of the siRNA molecule is equal to or greater than 10, 15, 20, 25, 30, 35, 40, 45, 50, 55, 60, 65, 70, 75, 80, 85, 90, 95, 100, 105, 110, 115, 120, 125, 130, 135, 140, 145, 150, 155, 160, 165, 170, 175, 180, 185, 190, 195, or 100 mg.

[0205] In some embodiments, treatment of a subject with a therapeutically effective amount of a siRNA molecule of the disclosure can include a single treatment or a series of treatments. In some embodiments, the siRNA molecule is administered as a single dose or may be divided into multiple doses. In some embodiments, the effective daily dose of the siRNA molecule may be administered as two, three, four, five, six, seven, eight, nine, ten or more doses or sub-doses administered separately at appropriate intervals throughout the day, optionally, in unit dosage forms.

[0206] In some embodiments, the siRNA molecule is administered once daily. In some embodiments, the siRNA molecule is administered once weekly. In some embodiments, the siRNA molecule is administered at least 1, 2, 3, 4, 5, 6, 7, 8, 9, 10, 11, 12, 13, 14, or 15 times per day. In some embodiments, the siRNA molecule is administered at least 1, 2, 3, 4, 5, 6, 7, 8, 9, 10, 11, 12, 13, 14, 15, 16, 17, 18, 19, 20, or 21 times a week. In some embodiments, the siRNA molecule is administered at least 1, 2, 3, 4, 5, 6, 7, 8, 9, 10, 11, 12, 13, 14, 15, 16, 17, 18, 19, 20, 21, 22, 23, 24, 25, 26, 27, 28, 29, 30, or 31 times a month. In some embodiments, the siRNA molecule is administered once every 1, 2, 3, 4, 5, 6, 7, 8, 9, 10, 11, 12, 13, 14, 15, 16, 17, 18, 19, 20, 21, 22, 23, 24, 25, 26, 27, 28, 29, 30, or 31 days. In some embodiments, the siRNA molecule is administered every 3 days. In some embodiments, the siRNA molecule is administered once every 1, 2, 3, 4, 5, 6, 7, 8, 9, 10, 11, 12, 13, 14, or 15 weeks. In some embodiments, the siRNA molecule is administered once a month. In some embodiments, the siRNA molecule is administered once every 1, 2, 3, 4, 5, 6, 7, 8, 9, 10, 11, 12, 13, 14, or 15 months.

[0207] In some embodiments, the siRNA molecule is administered at least 1, 2, 3, 4, 5, 6, 7, 8, 9, 10, 11, 12, 13, 14, 15, 16, 17, 18, 19, 20, 21, 22, 23, 24, 25, 26, 27, 28, 29, 30, 31, 32, 33, 34, 35, 36, 37, 38, 39, 40, 41, 42, 43, 44, 45, 46, 47, 48, 49, 50, 51, 52, or 53 times over a period of at least 1, 2, 3, 4, 5, 6, 7, 8, 9, 10, 11, 12, 13, 14, 15, 16, 17, 18, 19, 20, 21, 22, 23, 24, 25, 26, 27, 28, 29, 30, 31, 32, 33, 34, 35, 36, 37, 38, 39, 40, 41, 42, 43, 44, 45, 46, 47, 48, 49, 50, 51, 52, 53, 54, 55, 56, 57, 58, 59, 60, 61, 62, 63, 64, 65, 66, 67, 68, 69, or 70 days. In some embodiments, the siRNA molecule is administered at least 1, 2, 3, 4, 5, 6, 7, 8, 9, 10, 11, 12, 13, 14, 15, 16, 17, 18, 19, 20, 21, 22, 23, 24, 25, 26, 27, 28, 29, 30, 31, 32, 33, 34, 35, 36, 37, 38, 39, 40, 41, 42, 43, 44, 45, 46, 47, 48, 49, 50, 51, 52, or 53 times over a period of at least 1, 2, 3, 4, 5, 6, 7, 8, 9, 10, 11, 12, 13, 14, 15, 16, 17, 18, 19, 20, 21, 22, 23, 24, 25, 26, 27, 28, 29, 30, 31, 32, 33, 34, 35, 36, 37, 38, 39, 40, 41, 42, 43, 44, 45, 46, 47, 48, 49, 50, 51, 52, or 53 weeks. In some embodiments, the siRNA molecule is administered at least 1, 2, 3, 4, 5, 6, 7, 8, 9, 10, 11, 12, 13, 14, 15, 16, 17, 18, 19, 20, 21, 22, 23, 24, 25, 26, 27, 28, 29, 30, 31, 32, 33, 34, 35, 36, 37, 38, 39, 40, 41, 42, 43, 44, 45, 46, 47, 48, 49, 50, 51, 52, or 53 times over a period of at least 1, 2, 3, 4, 5, 6, 7, 8, 9, 10, 11, 12, 13, 14, 15, 16, 17, 18, 19, 20, 21, 22, 23, 24, 25, 26, 27, 28, 29, 30, 31, 32, 33, 34, 35, 36, 37, 38, 39, 40, 41, 42, 43, 44, 45, 46, 47, 48, 49, 50, 51, 52, or 53 months. In some embodiments, the siRNA molecule is administered at least once a week for a period of at least 1, 2, 3, 4, 5, 6, 7, 8, 9, 10, 11, 12, 13, 14, 15, 16, 17, 18, 19, 20, 21, 22, 23, 24, 25, 26, 27, 28, 29, 30, 31, 32, 33, 34, 35, 36, 37, 38, 39, 40, 41, 42, 43, 44, 45, 46, 47, 48, 49, 50, 51, 52, 53, 54, 55, 56, 57, 58, 59, 60, 61, 62, 63, 64, 65, 66, 67, 68, 69, or 70 weeks. In some embodiments, the siRNA molecule is administered at least once a week for a period of at least 1, 2, 3, 4, 5, 6, 7, 8, 9, 10, 11, 12, 13, 14, 15, 16, 17, 18, 19, 20, 21, 22, 23, 24, 25, 26, 27, 28, 29, 30, 31, 32, 33, 34, 35, 36, 37, 38, 39, 40, 41, 42, 43, 44, 45, 46, 47, 48, 49, 50, 51, 52, 53, 54, 55, 56, 57, 58, 59, 60, 61, 62, 63, 64, 65, 66, 67, 68, 69, or 70 months. In some embodiments, the siRNA molecule is administered at least twice a week for a period of at least 1, 2, 3, 4, 5, 6, 7, 8, 9, 10, 11, 12, 13, 14, 15, 16, 17, 18, 19, 20, 21, 22, 23, 24, 25, 26, 27, 28, 29, 30, 31, 32, 33, 34, 35, 36, 37, 38, 39, 40, 41, 42, 43, 44, 45, 46, 47, 48, 49, 50, 51, 52, 53, 54, 55, 56, 57, 58, 59, 60, 61, 62, 63, 64, 65, 66, 67, 68, 69, or 70 weeks. In some embodiments, the siRNA molecule is administered at least twice a week for a period of at least 1, 2, 3, 4, 5, 6, 7, 8, 9, 10, 11, 12, 13, 14, 15, 16, 17, 18, 19, 20, 21, 22, 23, 24, 25, 26, 27, 28, 29, 30, 31, 32, 33, 34, 35, 36, 37, 38, 39, 40, 41, 42, 43, 44, 45, 46, 47, 48, 49, 50, 51, 52, 53, 54, 55, 56, 57, 58, 59, 60, 61, 62, 63, 64, 65, 66, 67, 68, 69, or 70 months. In some embodiments, the siRNA molecule is administered at least once every two weeks for a period of at least 2, 3, 4, 5, 6, 7, 8, 9, 10, 11, 12, 13, 14, 15, 16, 17, 18, 19, 20, 21, 22, 23, 24, 25, 26, 27, 28, 29, 30, 31, 32, 33, 34, 35, 36, 37, 38, 39, 40, 41, 42, 43, 44, 45, 46, 47, 48, 49, 50, 51, 52, 53, 54, 55, 56, 57, 58, 59, 60, 61, 62, 63, 64, 65, 66, 67, 68, 69, or 70 weeks. In some embodiments, the siRNA molecule is administered at least once every two weeks for a period of at least 2, 3, 4, 5, 6, 7, 8, 9, 10, 11, 12, 13, 14, 15, 16, 17, 18, 19, 20, 21, 22, 23, 24, 25, 26, 27, 28, 29, 30, 31, 32, 33, 34, 35, 36, 37, 38, 39, 40, 41, 42, 43, 44, 45, 46, 47, 48, 49, 50, 51, 52, 53, 54, 55, 56, 57, 58, 59, 60, 61, 62, 63, 64, 65, 66, 67, 68, 69, or 70 months. In some embodiments, the siRNA molecule is administered at least once every four weeks for a period of at least 4, 5, 6, 7, 8, 9, 10, 11, 12, 13, 14, 15, 16, 17, 18, 19, 20, 21, 22, 23, 24, 25, 26, 27, 28, 29, 30, 31, 32, 33, 34, 35, 36, 37, 38, 39, 40, 41, 42, 43, 44, 45, 46, 47, 48, 49, 50, 51, 52, 53, 54, 55, 56, 57, 58, 59, 60, 61, 62, 63, 64, 65, 66, 67, 68, 69, or 70 weeks. In some embodiments, the siRNA molecule is administered at least once every four weeks for a period of at least 4, 5, 6, 7, 8, 9, 10, 11, 12, 13, 14, 15, 16, 17, 18, 19, 20, 21, 22, 23, 24, 25, 26, 27, 28, 29, 30, 31, 32, 33, 34, 35, 36, 37, 38, 39, 40, 41, 42, 43, 44, 45, 46, 47, 48, 49, 50, 51, 52, 53, 54, 55, 56, 57, 58, 59, 60, 61, 62, 63, 64, 65, 66, 67, 68, 69, or 70 months.

[0208] In some embodiments, a repeat-dose regimen may include administration of a therapeutically effective amount of siRNA on a regular basis, such as every other day, once weekly, once per quarter (i.e., about every 3 months), or once a year. In some embodiments, the dosage amount and/or frequency may be decreased after an initial treatment period. In some embodiments, when the siRNA molecules described herein are co-administered with another active agent, the therapeutically effective amount may be less than when the siRNA molecule is used alone.

### Methods and Uses

[0209] Disclosed herein are also methods of treating a PNPLA3-associated disease in a subject in need thereof, comprising administering to the subject any of the siRNA molecules and/or pharmaceutical compositions comprising a siRNA molecule disclosed herein. In an embodiment, the PNPLA3-associated disease is a liver disease.

[0210] When the siRNA molecules of the present disclosure are administered as pharmaceuticals, to humans and animals, they can be given per se or as a pharmaceutical composition as described above containing, for example, 0.1 to 99% (more preferably, 10 to 30%) of siRNA molecule in combination with a pharmaceutically acceptable carrier.

[0211] In some embodiments, a method of treating a disease in a subject in need thereof comprises administering to the subject an amount of any of the siRNA molecules disclosed herein. In an embodiment, the amount is a therapeutically effective amount. In some embodiments, a method of treating a disease in a subject in need thereof comprises administering to the subject an amount of any of the pharmaceutical compositions disclosed herein. In an embodiment, the amount is a therapeutically effective amount.

[0212] In some embodiments, a method of treating a disease in a subject in need thereof comprises administering to the subject any of the siRNA molecules or pharmaceutical compositions disclosed herein in combination with an additional active agent. In some embodiments, the additional active agent is a liver disease treatment agent. In an embodiment, the amount of the siRNA molecule is a therapeutically effective amount. In an embodiment, the amount of the additional active agent is a therapeutically effective amount.

[0213] In some embodiments, the siRNA molecule and the liver disease treatment agent are administered separately. In some embodiments, the siRNA molecule or pharmaceutical composition and the liver disease treatment agent are administered concurrently. In some embodiments, the siRNA molecule or pharmaceutical composition and the liver disease treatment agent are administered sequentially. In some embodiments, the siRNA molecule or pharmaceutical composition is administered prior to administering the liver disease treatment agent. In some embodiments, the siRNA molecule or pharmaceutical composition is administered after administering the liver disease treatment agent. In some embodiments, the pharmaceutical composition comprises the siRNA and the liver disease treatment agent.

[0214] Also disclosed herein are methods of reducing the expression level of PNPLA3 in a subject in need thereof comprising administering to the subject an amount of a siRNA molecule or pharmaceutical composition according to the disclosure. In an embodiment, the amount of the additional active agent is a therapeutically effective amount. In some embodiments, the method of reducing the expression level of PNPLA3 in a subject in need thereof comprising administering to the subject an amount of a siRNA molecule or pharmaceutical composition according to the disclosure reduces the expression level of PNPLA3 in hepatocytes in the subject following administration of the siRNA molecule or pharmaceutical composition as compared to the PNPLA3 expression level in a patient not receiving the siRNA or pharmaceutical composition.

[0215] Also disclosed herein are methods of preventing at least one symptom of a liver disease in a subject in need thereof comprising administering to the subject an amount of any of the siRNA molecules or pharmaceutical compositions of the disclosure, thereby preventing at least one symptom of a liver disease in the subject. In an embodiment, the amount of the additional active agent is a therapeutically effective amount.

[0216] In another aspect, disclosed herein are uses of any of the siRNA molecules or pharmaceutical compositions of the disclosure in the manufacture of a medicament for treating a liver disease. In some embodiments, the present disclosure provides use of a siRNA molecule of the disclosure or pharmaceutical composition comprising an siRNA of the disclosure that targets a PNPLA3 gene in a cell of a mammal in the manufacture of a medicament for inhibiting expression of the PNPLA3 gene in the mammal.

[0217] The methods and uses disclosed herein include administering to a mammal, e.g., a human, a pharmaceutical composition comprising a siRNA molecule that targets a PNPLA3 gene in a cell of the mammal and maintaining for a time sufficient to obtain degradation of the mRNA transcript of the PNPLA3 gene, thereby inhibiting expression of the PNPLA3 gene in the mammal.

[0218] The patient or subject of the described methods may be a mammal, and it includes humans and non-human mammals. In some embodiments, the subject is a human, such as an adult human, human teenager, human child, human toddler, or human infant.

[0219] The siRNA molecules and/or pharmaceutical compositions of the disclosure can be administered in the disclosed methods and uses by any administration route known in the art, including those described above such as, for example, subcutaneous, intravenous, oral, intraperitoneal, or parenteral routes, including, e.g., intracranial (e.g., intraventricular, intraparenchymal and intrathecal), intramuscular, transdermal, airway (aerosol), nasal, rectal, and topical (including buccal and sublingual) administration.

[0220] The siRNA molecules and/or pharmaceutical compositions of the disclosure can be administered in the disclosed methods and uses in any of the of dosages or dosage regimens described above.

### PNPLA3—Associated Diseases

[0221] Any of the siRNAs and/or pharmaceutical compositions and/or methods and/or uses disclosed herein may be used to treat a disease, disorder, and/or condition. In some embodiments, the disease, disorder, and/or condition is associated with PNPLA3 expression or activity. In some embodiments, the disease, disorder, and/or condition is a liver disease. As used herein, the term “PNPLA3-associated disease” includes a disease, disorder, or condition that would benefit from a downregulation in PNPLA3 gene expression, replication or activity. Non-limiting examples of PNPLA3-associated diseases include, but are not limited to, fatty liver (steatosis), nonalcoholic steatohepatitis (NASH), cirrhosis of the liver, accumulation of fat in the liver, inflammation of the liver, hepatocellular necrosis, liver fibrosis, obesity, or nonalcoholic fatty liver disease (NAFLD). In an embodiment, the PNPLA3-associated disease is NAFLD. In an embodiments, the PNPLA3-associated disease is NASH. In an embodiment, the PNPLA3-associated disease is fatty liver (steatosis).

### Combination Therapies

[0222] Any of the siRNAs or pharmaceutical compositions disclosed herein may be combined with one or more additional active agents in a pharmaceutical composition or in any method according to the disclosure or for use in treating a liver disease. An additional active agent refers to an ingredient with a pharmacologically effect at a relevant dose; an additional active agent may be another siRNA according to the disclosure, a siRNA not in accordance with the disclosure, or a non-siRNA active agent.

[0223] In some embodiments, at least 2, 3, 4, 5, 6, 7, 8, 9, 10 or more siRNAs disclosed herein are combined in a combination therapy.

[0224] In some embodiments, any of the siRNAs or pharmaceutical compositions disclosed herein are combined with a liver disease treatment agent in a combination therapy. In some embodiments, the liver disease treatment agent is selected from a peroxisome proliferator-activator receptor (PPAR) agonist, farnesoid X receptor (FXR) agonist, lipid-altering agent, incretin-based therapy, and thyroid hormone receptor (THR) modulator.

[0225] In some embodiments, any of the siRNAs or pharmaceutical compositions disclosed herein are combined with a PPAR agonist. In some embodiments, the PPAR agonist is selected from a PPARα agonist, dual PPARα/δ agonist, PPARγ agonist, and dual PPARα/γ agonist. In some embodiments, the dual PPARα agonist is a fibrate. In some embodiments, the PPARα/δ agonist is elafibranor. In some embodiments, the PPARγ agonist is a thiazolidinedione (TZD). In some embodiments, TZD is pioglitazone. In some embodiments, the dual PPARα/γ agonist is saroglitazar.

[0226] In some embodiments, any of the siRNAs or pharmaceutical compositions disclosed herein are combined with a FXR agonist. In some embodiments, the FXR agonist is selected from obeticholic acis (OCA) and TERN-1010.

[0227] In some embodiments, any of the siRNAs or pharmaceutical compositions disclosed herein are combined with a lipid-altering agent. In some embodiments, the lipid-altering agent is aramchol.

[0228] In some embodiments, any of the siRNAs or pharmaceutical compositions disclosed herein are combined with an incretin-based therapy. In some embodiments, the incretin-based therapy is a glucagon-like peptide 1 (GLP-1) receptor agonist or dipeptidyl peptidase 4 (DPP-4) inhibitor. In some embodiments, the GLP-1 receptor agonist is exenatide or liraglutide. In some embodiments, the DPP-4 inhibitor is sitagliptin or vildapliptin.

[0229] In some embodiments, any of the siRNAs or pharmaceutical compositions disclosed herein are combined with a THR modulator. In some embodiments, the THR modulator is selected from a THR-beta modulator and thyroid hormone analogue. Exemplary THR modulators are described in Jakobsson, et al., Drugs, 2017, 77(15):1613-1621, Saponaro, et al., Front Med (Lausanne), 2020, 7:331, and Kowalik, et al., Front Endocrinol, 2018, 9:382, which are incorporated by reference in their entireties. In some embodiments, the THR-beta modulator is a THR-beta agonist. In some embodiments, the THR-beta agonist is selected from is selected from KB141, sobetirome, Sob-AM2, eprotirome, VK2809, resmetirom, MB07344, IS25, TG68, GC-24 and any one of the compounds disclosed in U.S. Pat. No. 11,091,467, which is incorporated in its entirety herein. In some embodiments, the thyroid hormone analogue is selected from L-94901 and CG-23425.

[0230] Generally, the liver disease treatment agent may be used in any combination with the siRNA molecules of the disclosure in a single dosage formulation (e.g., a fixed dose drug combination), or in one or more separate dosage formulations which allows for concurrent or sequential administration of the active agents (co-administration of the separate active agents) to subjects. In some embodiments, the siRNA and the liver disease treatment agent are administered concurrently. In some embodiments, the siRNA and the liver disease treatment agent are administered sequentially. In some embodiments, the siRNA is administered prior to administering the liver disease treatment agent. In some embodiments, the siRNA is administered after administering the liver disease treatment agent. The sequence and frequency in which the siRNA and the liver disease treatment agent are administered can vary. In some embodiments, the siRNA and the liver disease treatment agent are in separate containers. In some embodiments, the siRNA and the liver disease treatment agent are in the same container. In some embodiments, the pharmaceutical composition comprises the siRNA and the liver disease treatment agent. The siRNA and the liver disease treatment agent can be administered by the same route of administration or by different routes of administration.

### EXAMPLES

[0231] The following examples are provided to illustrate the present disclosure. Those ordinarily skilled in the art will readily understand that known variations of the following methods, procedures, and/or materials can be used. These examples are provided for the purpose of further illustration and are not intended to be limitations on the disclosure.

[0232] Throughout the disclosure, including in the sequences, abbreviations and acronyms may be used with the following meanings unless otherwise indicated:

| Abbreviation(s) | Reagent |
|---|---|
| A | Adenosine |
| C | Cytidine |
| G | Guanosine |
| U | Uridine |
| fX | 2′-fluoro on X where X is A, C, G, or U |
| mX | 2′-O-methyl on X where X is A, C, G, or |
| | U |
| ps | phosphorothioate internucleoside linkage |
| v | vinyl phosphonate |
| EC50 | half-maximal effective concentration |
| GalNAc | N-acetylgalactosamine (including |
| | variations thereof, such as GalNAc4) |
| PD | pharmacodynamics |
| PK | pharmacokinetics |
| PNPLA3 | Patatin-like phospholipase domain- |
| | containing protein 3 gene, including |
| | variants thereof as described herein |
| RT-qPCR | reverse transcriptase-quantitative |
| | polymerase chain reaction |
| DMF | Dimethylformamide |
| AcSK | Acesulfame potassium |
| TBAI | Tetra-n-butylammonium iodide |
| H₂O | Water |
| EA/EtOAc | Ethyl acetate |
| Na₂SO₄ | Sodium sulfate |
| CDCl₃ | Deuterated chloroform |
| CH₃CN/ACN/MeCN | Acetonitrile |
| MeOH | Methanol |
| NaOH | Sodium hydroxide |
| Ar | Argon gas |
| HCl | Hydrochloric acid |
| i-Pr₂O | Diisopropyl ether |
| THF | Tetrahydrofuran |
| LiBr | Lithium bromide |
| DIEA/DIPEA | N,N-Diisopropylethylamine |
| Pd/C | Palladium metal on carbon support |
| N₂ | Nitrogen gas |
| H₂ | Hydrogen gas |
| CD₃CN | Deuterated acetonitrile |
| TBAF | Tetra-n-butylammonium fluoride |
| DCM/CH₂Cl₂ | Dichloromethane |
| MS | Molecular sieves |
| NaHCO₃ | Sodium bicarbonate |
| NH₄HCO₃ | Ammonium bicarbonate |
| iPrOH/iPr-OH/IPA | Isopropanol |
| TEA | Triethanolamine |
| PPh₃ | Triphenylphosphine |
| DIAD | Diisopropyl azodicarboxylate |
| EtOH | Ethanol |
| NH2NH2•H2O | Hydrazine monohydrate |
| DMSO-d₆ | Deuterated dimethyl sulfoxide |
| Py/Pyr | Pyridine |
| MsCl | Methanesulfonyl chloride |
| PE | Petroleum ether |
| CH₃COOH/AcOH | Acetic acid |
| SiO₂ | Silica/Silicone dioxide |
| I₂ | Iodine |
| Na₂S₂O₃ | Sodium thiosulfate |
| AgNO₃ | Silver nitrate |
| DMTCl/DMTrCl | 4,4′-dimethoxytrityl chloride |
| DTT | Dithiothreitol |
| LiOH•H₂O | Lithium hydroxide monohydrate |
| DCI | 1,1′-Carbonyldiimidazole |
| TEMPO | (2,2,6,6-Tetramethylpiperidin-1-yl)oxyl |
| DIB | Diisobutylene |
| SOCl₂ | Thionyl chloride |
| CD₃OD | Deuterated methanol |
| NaBD₄ | Sodium borodeuteride |
| TBSCl | Tert-butyldimethylsilyl chloride |
| Et3SiH | Triethylsilane |
| TFA | Trifluoroacetic acid |
| NH₃•H₂O/NH₃*H₂O | Ammonia |
| FA/HCOOH/HCO₂H | Formic acid |
| BTT | Benzyl-thio-tetrazole |
| DDTT | 3-[(Dimethylaminomethylene)amino]- |
| | 3H-1,2,4-dithiazole-5-thione |
| K₂CO₃ | Potassium carbonate |
| NaH₂PO₄ | Monosodium phosphate |
| NaBr | Sodium bromide |
| KSAc | Potassium thioacetate |
| LiAlH₄ | Lithium aluminium hydride |
| DMSO | Dimethyl sulfoxide |
| CEOP[N(iPr)₂]₂/CEP | 2-Cyanoethyl N,N- |
| [N(iPr)₂]₂/CEP/CEPCl | diisopropylchlorophosphoramidite |
| (CD₃O)₂Mg | Deuterated magnesium methoxide or d6- |
| | magnesium methoxide |
| NH₄Cl | Ammonium chloride |
| ACN-d₃ | Deuterated acetonitrile |
| D₂O | Heavy water/deuterium oxide |
| PDC | Pyridinium dichromate |
| Ac₂O | Acetic anhydride |
| MeOD | Monodeuterated methanol |
| CH₃COOD | Monodeuteroacetic acid |
| DCA | Dichloroacetic acid |
| TES | 2-{[1,3-Dihydroxy-2- |
| | (hydroxymethyl)propan-2- |
| | yl]amino}ethane-1-sulfonic acid |
| DMAP | 4-Dimethylaminopyridine |
| TPSCl | Triphenylsilyl chloride |
| BzCl | Benzoyl chloride |
| DMTrSH | 4,4′-Dimethoxytrityl thiol |
| NaOMe | Sodium methoxide |
| EDCI | 1-Ethyl-3-(3- |
| | dimethylaminopropyl)carbodiimide |
| POM | Polyoxymethylene |
| KOH | Potassium hydroxide |
| NaCl | Sodium chloride |
| iBuCl | Isobutyryl chloride |
| DAIB | (Diacetoxyiodo)benzene |
| NaI | Sodium iodide |
| Boc | Tert-butyloxycarbonyl |
| TMG | Tetramethylguanidine |
| TMSCHN₂ | Trimethylsilyldiazomethane |
| IBX | 2-Iodoxybenzoic acid |
| PivCl | Pivaloyl chloride/chloromethyl pivalate |
| NaH | Sodium hydride |
| CD₃I | Iodomethane-d₃ |
| BSA | Bis(trimethylsilyl)acetamide |
| TMSOTf | Trimethylsilyl trifluoromethanesulfonate |
| CH₃NH₂ | Methylamine |
| DPC | 1,5-Diphenylcarbazide |
| TrtCl/TrCl | Trityl chloride |
| DAST | Diethylaminosulfur trifluoride |
| Tf-Cl/TfCl | Trifluoromethanesulfonyl chloride |
| Et₃N | Triethylamine |
| KOAc | Potassium acetate |
| DABCO | 1,4-Diazabicyclo[2.2.2]octane |
| NaOAc | Sodium acetate |
| n-BuLi | n-Butyl lithium |
| BF₃•OEt₂ | Boron trifluoride etherate |
| BCl₃ | Boron trichloride/trichloroborane |
| NaN₃ | Sodium azide |
| DBU | 1,8-Diazabicyclo[5.4.0]undec-7-ene |
| NH₄F | Ammonium fluoride |
| (COCl)₂ | Oxalyl dichloride |
| MeNH₂ | Methylamine |
| Rh₂(OAc)₄ | Rhodium (II) acetate |
| Boc₂O | Di-tert-butyl dicarbonate |
| PPTS | Pyridinium p-toluenesulfonate |
| Ms₂O | Methanesulfonic anhydride |
| NaBH₄ | Sodium borohydride |
| PhCO2K | Potassium benzoate |
| p-TsOH/TsOH | p-Toluenesulfonic acid |
| NH₃ | Ammonia |
| TBDPSCl | tert-Butyldiphenylsilyl chloride |
| NaIO₄ | Sodium periodate |
| BAIB | (Diacetoxyiodo)benzene |
| Pb(OAc)₄ | Lead (IV) tetraacetate |
| MgSO₄ | Magnesium sulfate |
| CO₂ | Carbon dioxide |
| H₂O₂ | Hydrogen peroxide |
| CaCO₃ | Calcium carbonate |
| DIBAL-H | Diisobutylaluminum hydride |
| CuSO₄ | Copper (II) sulfate |
| CH₃I | Iodomethane |
| Ag₂O | Silver oxide |
| SnCl₄ | Tin (IV) chloride |
| MMTrCl | 4-Methoxytrityl chloride |
| Et₃Si | Triethylsilane |
| NaNO₂ | Sodium nitrite |
| TMSCl | Trimethylsilyl chloride |
| PacCl | Phenoxyacetyl chloride |
| BOMCl | Benzyl chloromethyl ether |
| DCE | Ethylene dichloride |
| t-BuOH | T-butyl alcohol |
| P₂O₅ | Phosphorus pentoxide |
| ETT | 5-Ethylthio-1H-tetrazole |
| AMA | Ammonia methylamine |

### Example 1. siNA Synthesis

[0233] This example describes an exemplary method for synthesizing ds-siNAs.

[0234] The 2′-OMe phosphoramidite 5′-O-DMT-deoxy Adenosine (NH-Bz), 3′-O-(2-cyanoethyl-N,N-diisopropyl phosphoramidite, 5′-O-DMT-deoxy Guanosine (NH-ibu), 3′-O-(2-cyanoethyl-N,N-diisopropyl phosphoramidite, 5′-O-DMT-deoxy Cytosine (NH-Bz), 3′-O-(2-cyanoethyl-N,N-diisopropyl phosphoramidite, 5′-O-DMT-Uridine 3′-O-(2-cyanoethyl-N,N-diisopropyl phosphoramidite were purchased from Thermo Fisher Milwaukee WI, USA.

[chemical structure]

[0235] The 2′-F-5′-O-DMT-(NH-Bz) Adenosine-3′-O-(2-cyanoethyl-N,N-diisopropyl phosphoramidite, 2′-F-5′-O-DMT-(NH-ibu)-Guanosine, 3′-O-(2-cyanoethyl-N,N-diisopropyl phosphoramidite, 5′-O-DMT-(NH-Bz)-Cytosine, 2′-F-3′-O-(2-cyanoethyl-N,N-diisopropyl phosphoramidite, 5′-O-DMT-Uridine, 2′-F-3′-O-(2-cyanoethyl-N,N-diisopropyl phosphoramidite were purchased from Thermo Fisher Milwaukee WI, USA.

[chemical structure]

[0236] All the monomers were dried in vacuum desiccator with desiccants (P₂O₅, RT 24 h). The solid supports (CPG) attached to the nucleosides and universal supports were obtained from LGC and Chemgenes. The chemicals and solvents for post synthesis workflow were purchased from commercially available sources like VWR/Sigma and used without any purification or treatment. Solvent (Acetonitrile) and solutions (amidite and activator) were stored over molecular sieves during synthesis.

[0237] The oligonucleotides were synthesized on DNA/RNA Synthesizers (Expedite 8909 or ABI-394 or MM-48) using standard oligonucleotide phosphoramidite chemistry starting from the 3′ residue of the oligonucleotide preloaded on CPG support. An extended coupling of 0.1M solution of phosphoramidite in CH₃CN in the presence of 5-(ethylthio)-1H-tetrazole activator to a solid bound oligonucleotide followed by standard capping, oxidation and deprotection afforded modified oligonucleotides. The 0.1M 12, THF:Pyridine;Water-7:2:1 was used as oxidizing agent while DDTT ((dimethylamino-methylidene)amino)-3H-1,2,4-dithiazaoline-3-thione was used as the sulfur-transfer agent for the synthesis of oligoribonucleotide phosphorothioates. The stepwise coupling efficiency of all modified phosphoramidites was more than 98%.

| Reagents | Detailed Description |
|---|---|
| Deblock Solution | 3% Dichloroacetic acid (DCA) in |
| | Dichloromethane (DCM) |
| Amidite Concentration | 0.1M in Anhydrous Acetonitrile |
| Activator | 0.25M Ethyl-thio-Tetrazole (ETT) |
| Cap-A solution | Acetic anhydride in Pyridine/THF |
| Cap-B Solution | 16% 1-Methylimidazole in THF |
| Oxidizing Solution | 0.02M I₂, THF:Pyridine; Water-7:2:1 |
| Sulfurizing Solution | 0.2M DDTT in Pyridine/Acetonitrile 1:1 |

### Cleavage and Deprotection:

[0238] Deprotection and cleavage from the solid support was achieved with mixture of ammonia methylamine (1:1, AMA) for 15 min at 65° C. When the universal linker was used, the deprotection was left for 90 min at 65° C. or solid supports were heated with aqueous ammonia (28%) solution at 55° C. for 8-16 h to deprotect the base labile protecting groups.

Quantitation of Crude siNA

[0239] Samples were dissolved in deionized water (1.0 mL) and quantitated as follows: blanking was first performed with water alone (2 ul) on Thermo Scientific™ Nanodrop UV spectrophotometer or BioTek™ Epoch™ plate reader then oligo sample reading was obtained at 260 nm. The crude material is dried down and stored at −20° C.

### Crude HPLC/LC-MS Analysis

[0240] The 0.1 OD of the crude samples were analyzed by HPLC and LC-MS. After confirming the crude LC-MS data then purification step was performed if needed based on the purity.

### HPLC Purification

[0241] The unconjugated and GalNAc modified oligonucleotides were purified by anion-exchange HPLC. The buffers were 20 mM sodium phosphate in 10% CH₃CN, pH 8.5 (buffer A) and 20 mM sodium phosphate in 10% CH₃CN, 1.0 M NaBr, pH 8.5 (buffer B). Fractions containing full-length oligonucleotides were pooled.

Desalting of Purified siNA

[0242] The purified dry siNA was then desalted using Sephadex G-25 M (Amersham Biosciences). The cartridge was conditioned with 10 mL of deionized water thrice. Finally, the purified siNA dissolved thoroughly in 2.5 mL RNAse free water was applied to the cartridge drop wise. The salt free siNA was eluted with 3.5 mL deionized water directly into a screw cap vial. Alternatively, some unconjugated siNA was deslated using Pall AcroPrep™ 3K MWCO desalting plates.

### IEX HPLC and Electrospray LC/MS Analysis

[0243] Approximately 0.10 OD of siNA was dissolved in water and then pipetted into HPLC autosampler vials for IEX-HPLC and LC/MS analysis. Analytical HPLC and ES LC-MS confirmed the identity and purity of the compounds.

### Duplex Preparation:

[0244] Single strand oligonucleotides (Sense and Antisense strands) were annealed (1:1 by molar equivalents, heat at 90° C. for 2 min followed by gradual cooling at room temperature) to give the duplex ds-siNA. The final compounds were analyzed on size exclusion chromatography (SEC).

### Example 2: Synthesis of 5′ End Cap Monomer

[chemical structure]

[chemical structure]

### Example 2 Monomer

### Example 2 Monomer Synthesis Scheme

[0245] Preparation of (2): To a solution of 1 (15 g, 57.90 mmol) in DMF (150 mL) were added AcSK (11.24 g, 98.43 mmol) and TBAI (1.07 g, 2.89 mmol), and the mixture was stirred at 25° C. for 12 h. Upon completion as monitored by LCMS, the mixture was diluted with H2O (10 mL) and extracted with EA (200 mL*3). The combined organic layers were washed with brine (200 mL*3), dried over anhydrous Na₂SO₄, filtered and concentrated under reduced pressure to give 2 (14.5 g, 96.52% yield, 98% purity) as a colorless oil. ESI-LCMS: 254.28 [M+H]⁺; ¹H NMR (400 MHz, CDCl₃) δ=4.78-4.65 (m, 2H), 3.19 (d, J=14.1 Hz, 2H), 2.38 (s, 3H), 1.32 (t, J=6.7 Hz, 12H); 31p NMR (162 MHz, CDCl₃) δ=20.59.

[0246] Preparation of (3): To a solution of 2 (14.5 g, 57.02 mmol) in CH₃CN (50 mL) and MeOH (25 mL) was added NaOH (3 M, 28.51 mL), and the mixture was stirred at 25° C. for 12 h under Ar. Upon completion as monitored by TLC, the reaction mixture was concentrated under reduced pressure to remove CH₃CN and CH₃OH. The residue was diluted with water (50 mL) and adjust pH=7 by 6M HCl, and the mixture was extracted with EA (50 mL*3). The combined organic layers were washed with brine (50 mL*3), dried over anhydrous Na₂SO₄, filtered and concentrated under reduced pressure to give 3 (12.1 g, crude) as a colorless oil.

[0247] Preparation of (4): To a solution of 3 (12.1 g, 57.01 mmol) in CH₃CN (25 mL) and MeOH (25 mL) was added A (14.77 g, 57.01 mmol) dropwise at 25° C., and the mixture was stirred at 25° C. under Ar for 12 h. Upon completion as monitored by LCMS, the reaction mixture was concentrated under reduced pressure to give 4 (19.5 g, 78.85% yield) as a colorless oil. ¹H NMR (400 MHz, CDCl₃) δ=4.80-4.66 (m, 4H), 2.93 (d, J=11.3 Hz, 4H), 1.31 (dd, J=3.9, 6.1 Hz, 24H); ³¹P NMR (162 MHz, CDCl₃) δ=22.18.

[0248] Preparation of (5): To a solution of 4 (19.5 g, 49.95 mmol) in MeOH (100 mL) and H2O (100 mL) was added Oxone (61.41 g, 99.89 mmol) at 25° C. in portions, and the mixture was stirred at 25° C. for 12 h under Ar. Upon completion as monitored by LCMS, the reaction mixture was filtered, and the filtrate was concentrated under reduced pressure to remove MeOH. The residue was extracted with EA (50 mL*3). The combined organic layers were washed with brine (50 mL*3), dried over anhydrous Na₂SO₄, filtered and concentrated under reduced pressure to give a residue. The crude product was triturated with i-Pr₂O and n-Hexane (1:2, 100 mL) at 25° C. for 30 min to give 5 (15.6 g, 73.94% yield) as a white solid. ¹H NMR (400 MHz, CDCl₃) δ=4.92-4.76 (m, 4H), 4.09 (d, J=16.1 Hz, 4H), 1.37 (dd, J=3.5, 6.3 Hz, 24H); ³¹P NMR (162 MHz, CDCl₃) δ=10.17.

[0249] Preparation of (7): To a mixture of 5 (6.84 g, 16.20 mmol) in THF (20 mL) was added LiBr (937.67 mg, 10.80 mmol) until dissolved, followed by DIEA (1.40 g, 10.80 mmol, 1.88 mL) under argon at 15° C. The mixture was stirred at 15° C. for 15 min. 6 (4 g, 10.80 mmol) were added. The mixture was stirred at 15° C. for 3 h. Upon completion as monitored by LCMS, the reaction mixture was quenched by addition of H₂O (40 mL) and extracted with EA (40 mL*3). The combined organic layers were washed with brine (100 mL), dried over Na₂SO₄, filtered and concentrated under reduced pressure to give a residue. The residue was purified by flash reverse-phase chromatography (120 g C-18 Column, Eluent of 0˜60% ACN/H₂O gradient @80 mL/min) to give 7 (5.7 g, 61.95% yield) as a colorless oil. ESI-LCMS: 611.2 [M+H]⁺; ¹H NMR (400 MHz, CDCl₃); δ=9.26 (s, 1H), 7.50 (d, J=8.1 Hz, 1H), 7.01 (s, 2H), 5.95 (d, J=2.7 Hz, 1H), 5.80 (dd, J=2.1, 8.2 Hz, 1H), 4.89-4.72 (m, 2H), 4.66 (d, J=7.2 Hz, 1H), 4.09-4.04 (m, 1H), 3.77 (dd, J=2.7, 4.9 Hz, 1H), 3.62 (d, J=3.1 Hz, 1H), 3.58 (d, J=3.1 Hz, 1H), 3.52 (s, 3H), 1.36 (td, J=1.7, 6.1 Hz, 12H), 0.92 (s, 9H), 0.12 (s, 6H); ³¹P NMR (162 MHz, CDCl₃) δ=9.02

[0250] Preparation of (8): To a mixture of 7 (5.4 g, 8.84 mmol) in THF (80 mL) was added Pd/C (5.4 g, 10% purity) under N₂. The suspension was degassed under vacuum and purged with H₂ several times. The mixture was stirred under H₂ (15 psi) at 20° C. for 1 hr. Upon completion as monitored by LCMS, the reaction mixture was filtered, and the filtrate was concentrated to give 8 (5.12 g, 94.5% yield) as a white solid. ESI-LCMS: 613.3 [M+H]⁺; H NMR (400 MHz, CD₃CN) δ=9.31 (s, 1H), 7.37 (d, J=8.0 Hz, 1H), 5.80-5.69 (m, 2H), 4.87-4.75 (m, 2H), 4.11-4.00 (m, 1H), 3.93-3.85 (m, 1H), 3.80-3.74 (m, 1H), 3.66-3.60 (m, 1H), 3.57-3.52 (m, 1H), 3.49 (s, 3H), 3.46-3.38 (m, 1H), 2.35-2.24 (m, 1H), 2.16-2.03 (m, 1H), 1.89-1.80 (m, 1H), 1.37-1.34 (m, 12H), 0.90 (s, 9H), 0.09 (s, 6H); ³¹P NMR (162 MHz, CD₃CN) δ=9.41.

[0251] Preparation of (9): To a solution of 8 (4.4 g, 7.18 mmol) in THF (7.2 mL) was added TBAF (1 M, 7.18 mL), and the mixture was stirred at 20° C. for 1 hr. Upon completion as monitored by LCMS, the reaction mixture was diluted with H₂O (50 mL) and extracted with EA (50 mL*4). The combined organic layers were washed with brine (50 mL), dried over Na₂SO₄, filtered and concentrated under reduced pressure to give a residue. The residue was purified by flash silica gel chromatography (ISCO®; 40 g SepaFlash® Silica Flash Column, Eluent of 0˜5%, MeOH/DCM gradient @40 mL/min) to give 9 (3.2 g, 88.50% yield) as a white solid. ESI-LCMS: 499.2 [M+H]⁺¹; ¹H NMR (400 MHz, CD₃CN) δ=9.21 (s, 1H), 7.36 (d, J=8.3 Hz, 1H), 5.81-5.72 (m, 2H), 4.88-4.74 (m, 2H), 3.99-3.87 (m, 2H), 3.84 (dd, J=1.9, 5.4 Hz, 1H), 3.66-3.47 (m, 7H), 2.98 (s, 1H), 2.44-2.15 (m, 2H), 1.36 (d, J=6.0 Hz, 12H); ³¹P NMR (162 MHz, CD₃CN) δ=9.48.

[0252] Preparation of (Example 2 monomer): To a mixture of 9 (3.4 g, 6.82 mmol, 1 eq) and 4A MS (3.4 g) in MeCN (50 mL) was added P1 (2.67 g, 8.87 mmol, 2.82 mL, 1.3 eq) at 0° C., followed by addition of 1H-imidazole-4,5-dicarbonitrile (886.05 mg, 7.50 mmol) at 0° C. The mixture was stirred at 20° C. for 2 h. Upon completion as monitored by LCMS, the reaction mixture was quenched by addition of saturated aq·NaHCO₃ (50 mL) and diluted with DCM (100 mL). The organic layer was washed with saturated aq·NaHCO₃ (50 mL*2), dried over Na₂SO₄, filtered and concentrated under reduced pressure to give a residue. The residue was purified by prep-HPLC: column: YMC-Triart Prep C18 250*50 mm*10 um; mobile phase: [water (10 mM NH₄HCO₃)-ACN]; B %: 15% to give a impure product. The impure product was further purified by a flash silica gel column (0% to 5% i-PrOH in DCM with 0.5% TEA) to give Example 2 monomer (2.1 g, 43.18% yield) as a white solid. ESI-LCMS: 721.2 [M+Na]⁺: H NMR (400 MHz, CD₃CN) δ=9.29 (s, 1H), 7.45 (d, J=8.1 Hz, 1H), 5.81 (d, J=4.2 Hz, 1H), 5.65 (d, J=8.1 Hz, 1H), 4.79-4.67 (m, 2H), 4.26-4.05 (m, 2H), 4.00-3.94 (m, 1H), 3.89-3.63 (m, 6H), 3.53-3.33 (m, 5H), 2.77-2.61 (m, 2H), 2.31-2.21 (m, 1H), 2.16-2.07 (m, 1H), 1.33-1.28 (m, 12H), 1.22-1.16 (m, 1H), 1.22-1.16 (m, 11H); ³¹P NMR (162 MHz, CD₃CN) δ=149.89, 149.78, 10.07, 10.02.

### Example 3. Synthesis of 5′ End Cap Monomer

[chemical structure]

[chemical structure]

### Example 3 Monomer Synthesis Scheme

[0253] Preparation of (2): To a solution of 1 (5 g, 13.42 mmol) in DMF (50 mL) were added PPh₃ (4.58 g, 17.45 mmol) and 2-hydroxyisoindoline-1,3-dione (2.85 g, 17.45 mmol), followed by a solution of DIAD (4.07 g, 20.13 mmol, 3.91 mL) in DMF (10 mL) dropwise at 15° C. The resulting solution was stirred at 15° C. for 18 hr. The reaction mixture was then diluted with DCM (50 mL), washed with H₂O (60 mL*3) and brine (30 mL), dried over Na₂SO₄, filtered and evaporated to give a residue. The residue was then triturated with EtOH (55 mL) for 30 min, and the collected white powder was washed with EtOH (10 mL*2) and dried to give 2 (12.2 g, 85.16% yield) as a white powder (the reaction was set up in two batches and combined) ESI-LCMS: 518.1 [M+H]⁺.

[0254] Preparation of (3): 2 (6 g, 11.59 mmol) was suspended in MeOH (50 mL), and then NH₂NH₂·H₂O (3.48 g, 34.74 mmol, 3.38 mL, 50% purity) was added dropwise at 20° C. The reaction mixture was stirred at 20° C. for 4 hr. Upon completion, the reaction mixture was diluted with EA (20 mL) and washed with NaHCO₃ (10 mL*2) and brine (10 mL). The combined organic layers were then dried over Na₂SO₄, filtered and evaporated to give 3 (8.3 g, 92.5% yield) as a white powder. (The reaction was set up in two batches and combined). ESI-LCMS: 388.0 [M+H]⁺; ¹H NMR (400 MHz, DMSO-d₆) δ=11.39 (br s, 1H), 7.72 (d, J=8.1 Hz, 1H), 6.24-6.09 (m, 2H), 5.80 (d, J=4.9 Hz, 1H), 5.67 (d, J=8.1 Hz, 1H), 4.26 (t, J=4.9 Hz, 1H), 4.03-3.89 (m, 1H), 3.87-3.66 (m, 3H), 3.33 (s, 3H), 0.88 (s, 9H), 0.09 (d, J=1.3 Hz, 6H)

[0255] Preparation of (4): To a solution of 3 (7 g, 18.06 mmol) and Py (1.43 g, 18.06 mmol, 1.46 mL) in DCM (130 mL) was added a solution of MsCl (2.48 g, 21.68 mmol, 1.68 mL) in DCM (50 mL) dropwise at −78° C. under N₂. The reaction mixture was allowed to warm to 15° C. in 30 min and stirred at 15° C. for 3 h. The reaction mixture was quenched by addition of ice-water (70 mL) at 0° C., and then extracted with DCM (50 mL*3). The combined organic layers were washed with saturated aq·NaHCO₃ (50 mL) and brine (30 mL), dried over Na₂SO₄, filtered and concentrated under reduced pressure to give a residue. The residue was purified by flash silica gel chromatography (ISCO®; 30 g SepaFlash® Silica Flash Column, Eluent of 0˜20% i-PrOH/DCM gradient @30 mL/min to give 4 (6.9 g, 77.94% yield) as a white solid. ESI-LCMS: 466.1 [M+H]⁺; ¹H NMR (400 MHz, DMSO-d₆) δ=11.41 (br s, 1H), 10.15 (s, 1H), 7.69 (d, J=8.1 Hz, 1H), 5.80 (d, J=4.4 Hz, 1H), 5.65 (d, J=8.1 Hz, 1H), 4.24 (t, J=5.2 Hz, 1H), 4.16-3.98 (m, 3H), 3.87 (t, J=4.8 Hz, 1H), 3.00 (s, 3H), 2.07 (s, 3H), 0.88 (s, 9H), 0.10 (d, J=1.5 Hz, 6H)

[0256] Preparation of (5): To a solution of 4 (6.9 g, 14.82 mmol) in THF (70 mL) was added TBAF (1 M, 16.30 mL) at 15° C. The reaction mixture was stirred at 15° C. for 18 hr, and then evaporated to give a residue. The residue was purified by flash silica gel chromatography (ISCO®; 24 g SepaFlash® Silica Flash Column, Eluent of 0˜9% MeOH/Ethyl acetate gradient @30 mL/min) to give 5 (1.8 g, 50.8% yield) as a white solid. ESI-LCMS: 352.0 [M+H]⁺; ¹H NMR (400 MHz, DMSO-d₆) δ=11.40 (s, 1H), 10.13 (s, 1H), 7.66 (d, J=8.1 Hz, 1H), 5.83 (d, J=4.9 Hz, 1H), 5.65 (dd, J=1.8, 8.1 Hz, 1H), 5.36 (d, J=6. 2 Hz, 1H), 4.13-4.00 (m, 4H), 3.82 (t, J=5.1 Hz, 1H), 3.36 (s, 3H), 3.00 (s, 3H)

[0257] Preparation of (Example 3 monomer): To a mixture of 5 (3 g, 8.54 mmol) and DIEA (2.21 g, 17.08 mmol, 2.97 mL) in ACN (90 mL) was added CEPCl (3.03 g, 12.81 mmol) dropwise at 15° C. The reaction mixture was stirred at 15° C. for 5 h. Upon completion, the reaction mixture was diluted with EA (40 mL) and quenched with 5% NaHCO₃ (20 mL). The organic layer was washed with brine (30 mL), dried over Na₂SO₄, filtered and evaporated to give a residue. The residue was purified by flash silica gel chromatography (ISCO®; 12 g SepaFlash® Silica Flash Column, Eluent of 0˜15% i-PrOH/(DCM with 2% TEA) gradient @20 mL/min) to Example 3 monomer (2.1 g, 43.93% yield) as a white solid. ESI-LCMS: 552.3 [M+H]⁺; ¹H NMR (400 MHz, CD₃CN) δ=8.78 (br s, 1H), 7.57 (dd, J=4.6, 8.2 Hz, 1H), 5.97-5.80 (m, 1H), 5.67 (d, J=8.3 Hz, 1H), 4.46-4.11 (m, 4H), 3.95-3.58 (m, 5H), 3.44 (d, J=16.3 Hz, 3H), 3.02 (d, J=7.5 Hz, 3H), 2.73-2.59 (m, 2H), 1.23-1.15 (m, 12H); ³¹P NMR (162 MHz, CD₃CN) δ=150.30, 150.10

### Example 4: Synthesis of 5′ End Cap Monomer

[chemical structure]

### Example 4 Monomer Synthesis Scheme

[0258] Preparation of (2): To the solution of 1 (5 g, 12.90 mmol) and TEA (1.57 g, 15.48 mmol, 2.16 mL) in DCM (50 mL) was added P-4 (2.24 g, 15.48 mmol, 1.67 mL) in DCM (10 mL) dropwise at 15° C. under N₂. The reaction mixture was stirred at 15° C. for 3 h. Upon completion as monitored by LCMS and TLC (PE:EtOAc=0:1), the reaction mixture was concentrated to dryness, diluted with H₂O (20 mL), and extracted with EA (50 mL*3). The combined organic layers were washed with brine (30 mL*3), dried over anhydrous Na₂SO₄, filtered, and the filtrate was concentrated under reduced pressure to give a residue. The residue was purified by flash silica gel chromatography (ISCO®; 40 g SepaFlash® Silica Flash Column, Eluent of 0˜95% Ethyl acetate/Petroleum ether gradient @60 mL/min) to give 2 (5.3 g, 71.3% yield) as a white solid. ESI-LCMS: 496.1 [M+H]⁺; H NMR (400 MHz, CDCl₃) δ=0.10 (d, J=4.02 Hz, 6H) 0.91 (s, 9H) 3.42-3.54 (m, 3H) 3.65-3.70 (m, 1H) 3.76-3.89 (m, 6H) 4.00 (dd, J=10.92, 2.89 Hz, 1H) 4.08-4.13 (m, 1H) 4.15-4.23 (m, 2H) 5.73 (dd, J=8.28, 2.01 Hz, 1H) 5.84 (d, J=2.76 Hz, 1H) 6.86 (d, J=15.81 Hz, 1H) 7.72 (d, J=8.03 Hz, 1H) 9.10 (s, 1H); ³¹P NMR (162 MHz, CD₃CN) δ=9.65

[0259] Preparation of (3): To a solution of 2 (8.3 g, 16.75 mmol) in THF (50 mL) were added TBAF (1 M, 16.75 mL) and CH₃COOH (1.01 g, 16.75 mmol, 957.95 uL). The mixture was stirred at 20° C. for 12 hr. Upon completion as monitored by LCMS, the reaction mixture was concentrated under reduced pressure. The residue was purified by column chromatography (SiO₂, PE:EA=0˜100%; MeOH/EA=0˜10%) to give 3 (5 g, 77.51% yield) as a white solid. ESI-LCMS: 382.1 [M+H]⁺; ¹H NMR (400 MHz, CDCl₃) δ=3.35 (s, 3H) 3.65 (br d, J=2.76 Hz, 3H) 3.68 (d, J=2.76 Hz, 3H) 3.77 (t, J=5.08 Hz, 1H) 3.84-4.10 (m, 4H) 5.33 (br d, J=5.52 Hz, 1H) 5.62 (d, J=7.77 Hz, 1H) 5.83 (d, J=4.94 Hz, 1H) 7.69 (d, J=7.71 Hz, 1H) 9.08 (d, J=16.81 Hz, 1H) 11.39 (br s, 1H); ³¹P NMR (162 MHz, CD₃CN) δ=15.41

[0260] Preparation of (Example 4 monomer): To a solution of 3 (2 g, 5.25 mmol) and DIPEA (2.03 g, 15.74 mmol, 2.74 mL, 3 eq) in MeCN (21 mL) and pyridine (7 mL) was added CEOP[N(iPr)₂]₂/CEP[N(iPr)₂]₂/CEP/CEPCl (1.86 g, 7.87 mmol) dropwise at 20° C., and the mixture was stirred at 20° C. for 3 hr. Upon completion as monitored by LCMS, the reaction mixture was diluted with water (20 mL) and extracted with EA (50 mL). The combined organic layers were washed with brine (30 mL), dried over anhydrous Na₂SO₄, filtered, and the filtrate was concentrated under reduced pressure to give a residue. The residue was purified by flash silica gel chromatography (ISCO®; 25 g SepaFlash® Silica Flash Column, Eluent of 0˜45% (Ethyl acetate:EtOH=4:1)/Petroleum ether gradient) to give Example 4 monomer (1.2 g, 38.2% yield) as a white solid. ESI-LCMS: 604.1 [M+H]⁺; H NMR (400 MHz, CD₃CN) δ=1.12-1.24 (m, 12H) 2.61-2.77 (m, 2H) 3.43 (d, J=17.64 Hz, 3H) 3.59-3.69 (m, 2H) 3.71-3.78 (m, 6H) 3.79-4.14 (m, 5H) 4.16-4.28 (m, 1H) 4.29-4.42 (m, 1H) 5.59-5.72 (m, 1H) 5.89 (t, J=4.53 Hz, 1H) 7.48 (br d, J=12.76 Hz, 1H) 7.62-7.74 (m, 1H) 9.26 (br s, 1H); ³¹P NMR (162 MHz, CD₃CN) δ=150.57, 149.96, 9.87

### Example 5: Synthesis of 5′ End Cap Monomer

[chemical structure]

[chemical structure]

### Example 5 Monomer Synthesis Scheme

[0261] Preparation of (2): To a solution of 1 (30 g, 101.07 mmol, 87 purity) in CH₃CN (1.2 L) and Py (60 mL) were added 12 (33.35 g, 131.40 mmol, 26.47 mL) and PPh₃ (37.11 g, 141.50 mmol) in one portion at 10° C. The reaction was stirred at 25° C. for 48 h. Upon completion, the mixture was diluted with saturated aq·Na₂S₂O₃ (300 mL) and saturated aq·NaHCO₃ (300 mL), concentrated to remove CH₃CN, and extracted with EtOAc (300 mL*3). The combined organic layers were washed with brine (300 mL), dried over Na₂S04, filtered and concentrated under reduced pressure to give a residue. The residue was purified by flash silica gel chromatography (ISCO®; 330 g SepaFlash® Silica Flash Column, Eluent of 0-60% Methanol/Dichloromethane gradient @100 mL/min) to give 2 (28.2 g, 72% yield) as a brown solid. ESI-LCMS: 369.1 [M+H]⁺: H NM/R (400 MHz, DMSO-d₆) δ=11.43 (s, 1H), 7.68 (d, J=8.1 Hz, 1H), 5.86 (d, J=5.5 Hz, 1H), 5.69 (d, J=8.1 Hz, 1H), 5.46 (d, J=6.0 Hz, 1H), 4.08-3.96 (m, 2H), 3.90-3.81 (m, 1H), 3.60-3.51 (m, 1H), 3.40 (dd, J=6.9, 10.6 Hz, 1H), 3.34 (s, 3H).

[0262] Preparation of (3): To the solution of 2 (12 g, 32.6 mmol) in DCM (150 mL) were added AgNO₃ (11.07 g, 65.20 mmol), 2,4,6-trimethylpyridine (11.85 g, 97.79 mmol, 12.92 mL), and DMTCl (22.09 g, 65.20 mmol) at 10° C., and the reaction mixture was stirred at 10° C. for 16 hr. Upon completion, the mixture was filtered and the filtrate was concentrated under reduced pressure. The residue was purified by flash silica gel chromatography (ISCO®; 120 g SepaFlash® Silica Flash Column, Eluent of 0˜50% Ethyl acetate/Petroleum ethergradient @60 mL/min) to give 3 (17 g, 70.78% yield) as a yellow solid. ESI-LCMS: 693.1 [M+Na]⁺¹; H NMR (400 MHz, DMSO-d₆) δ=11.46 (s, 1H), 7.60 (d, J=8.4 Hz, 1H), 7.49 (d, J=7.2 Hz, 2H), 7.40-7.30 (m, 6H), 7.29-7.23 (m, 1H), 6.93 (d, J=8.8 Hz, 4H), 5.97 (d, J=6.0 Hz, 1H), 5.69 (d, J=8.0 Hz, 1H), 4.05-4.02 (m, 1H), 3.75 (d, J=1.2 Hz, 6H), 3.57 (t, J=5.6 Hz, 1H), 3.27 (s, 4H), 3.06 (t, J=10.4 Hz, 1H), 2.98-2.89 (m, 1H).

[0263] Preparation of (4): To a solution of 3 (17 g, 25.35 mmol) in DMF (200 mL) was added AcSK (11.58 g, 101.42 mmol) at 25° C., and the reaction was stirred at 60° C. for 2 hr. The mixture was diluted with H₂O (600 mL) and extracted with EtOAc (300 mL*4). The combined organic layers were washed with brine (300 mL), dried over Na₂SO₄, filtered, and concentrated under reduced pressure to give 4 (15.6 g, crude) as a brown solid, which was used directly without further purification. ESI-LCMS: 641.3 [M+H]⁺.

[0264] Preparation of (5): To a solution of 4 (15.6 g, 25.21 mmol) in CH₃CN (200 mL) were added DTT (11.67 g, 75.64 mmol, 11.22 mL) and LiOH·H₂O (1.06 g, 25.21 mmol) at 10° C. under Ar. The reaction was stirred at 10° C. for 1 hr. The mixture was concentrated under reduced pressure to remove CH₃CN, and the residue was diluted with H₂O (400 mL) and extracted with EtOAc (200 mL*3). The combined organic layers were washed with brine (300 mL), dried over Na₂SO₄, filtered and concentrated under reduced pressure to give a residue. The residue was purified by flash silica gel chromatography (ISCO®; 220 g SepaFlash® Silica Flash Column, Eluent of 0˜60% Ethyl acetate/Petroleum ether gradient @100 mL/min) to give 5 (8.6 g, 56.78% yield) as a white solid. ESI-LCMS: 599.3 [M+Na]⁺; ¹H NMR (400 MHz, DMSO-d₆) δ=8.79 (s, 1H), 7.61 (d, J=8.0 Hz, 1H), 7.56-7.46 (m, 2H), 7.45-7.37 (m, 4H), 7.36-7.27 (m, 3H), 6.85 (dd, J=2.8, 8.8 Hz, 4H), 5.85 (d, J=1.3 Hz, 1H), 5.68 (dd, J=2.0, 8.2 Hz, 1H), 4.33-4.29 (m, 1H), 3.91 (dd, J=4.8, 8.2 Hz, 1H), 3.81 (d, J=1.6 Hz, 6H), 3.33 (s, 3H), 2.85-2.80 (m, 1H), 2.67-2.55 (m, 2H), 1.11 (t, J=8.8 Hz, 1H).

[0265] Preparation of (Example 5 monomer): To a solution of 5 (6 g, 10.40 mmol) in DCM (120 mL) were added P1 (4.08 g, 13.53 mmol, 4.30 mL) and DCI (1.35 g, 11.45 mmol) in one portion at 10° C. under Ar. The reaction was stirred at 10° C. for 2 hr. The reaction mixture was diluted with saturated aq·NaHCO₃ (50 mL) and extracted with DCM (20 mL*3). The combined organic layers were washed with brine (30 mL), dried over Na₂SO₄, filtered and concentrated under reduced pressure to give a residue. The residue was purified by prep-HPLC (column: YMC-Triart Prep C18 250*50 mm*10 um; mobile phase: [water (10 mM NH₄HCO₃)-ACN]; B %: 35%-81%, 20 min) to give Example 5 monomer (3.54 g, 43.36% yield) as a yellow solid. ESI-LCMS: 776.4 [M+H]⁺; ¹H NMR (400 MHz, DMSO-d₆) δ=7.65-7.38 (m, 7H), 7.37-7.22 (m, 3H), 6.90 (d, J=8.4 Hz, 4H), 5.92 (s, 1H), 5.66 (t, J=8.2 Hz, 1H), 4.13 (d, J=4.0 Hz, 1H), 4.00-3.88 (m, 1H), 3.87-3.59 (m, 10H), 3.33 (d, J=5.8 Hz, 3H), 3.12-2.94 (m, 1H), 2.78-2.60 (m, 3H), 2.55-2.48 (m, 1H), 1.36-0.98 (m, 12H); ³¹P NMR (162 MHz, DMSO-d₆) δ=162.69.

### Example 6: Synthesis of 5′ End Cap Monomer

[chemical structure]

[chemical structure]

### Example 6 Monomer Synthesis Scheme

[0266] Preparation of (2): To a solution of 1 (22.6 g, 45.23 mmol) in DCM (500 mL) and H₂O (125 mL) were added TEMPO (6.40 g, 40.71 mmol) and DIB (29.14 g, 90.47 mmol) at 0° C. The mixture was stirred at 20° C. for 20 h. Upon completion as monitored by LCMS, saturated aq·NaHCO₃ was added to the mixture to adjust pH >8. The mixture was diluted with H₂O (200 mL) and washed with DCM (100 mL*3). The aqueous layer was collected, adjusted to pH<5 by HCl (4M), and extracted with DCM (200 mL*3). The combined organic layers were washed with brine (300 mL), dried over Na₂SO₄, filtered, and concentrated under reduced pressure to give 2 (17.5 g, 68.55% yield) as a yellow solid. ESI-LCMS: 514.2 [M+H]⁺; ¹H NMR (400 MHz, DMSO-d₆) δ=11.27 (s, 1H), 8.86 (s, 1H), 8.78 (s, 1H), 8.06 (d, J=7.5 Hz, 2H), 7.68-7.62 (m, 1H), 7.59-7.52 (m, 2H), 6.28 (d, J=6.8 Hz, 1H), 4.82-4.76 (m, 1H), 4.54 (dd, J=4.1, 6.7 Hz, 1H), 4.48 (d, J=1.8 Hz, 1H), 3.32 (s, 3H), 0.94 (s, 9H), 0.18 (d, J=4.8 Hz, 6H).

[0267] Preparation of (3): To a solution of 2 (9.3 g, 18.11 mmol) in MeOH (20 mL) was added SOCl₂ (3.23 g, 27.16 mmol, 1.97 mL) dropwise at 0° C. The mixture was stirred at 20° C. for 0.5 hr. Upon completion as monitored by LCMS, the reaction mixture was quenched by addition of saturated aq·NaHCO₃ (80 mL) and concentrated under reduced pressure to remove MeOH. The aqueous layer was extracted with DCM (80 mL*3). The combined organic layers were washed with brine (200 mL), dried over Na₂SO₄, filtered and concentrated under reduced pressure to give a residue. The residue was purified by flash silica gel chromatography (ISCO®; 120 g SepaFlash® Silica Flash Column, Eluent of 0˜5%, MeOH/DCM gradient @85 mL/min) to give 3 (5.8 g, 60% yield) as a yellow solid. ESI-LCMS: 528.3 [M+H]⁺; ¹H NMR (400 MHz, DMSO-d₆) δ=11.28 (s, 1H), 8.79 (d, J=7.3 Hz, 2H), 8.06 (d, J=7.5 Hz, 2H), 7.68-7.62 (m, 1H), 7.60-7.53 (m, 2H), 6.28 (d, J=6.6 Hz, 1H), 4.87 (dd, J=2.4, 4.0 Hz, 1H), 4.61 (dd, J=4.3, 6.5 Hz, 1H), 4.57 (d, J=2.2 Hz, 1H), 3.75 (s, 3H), 3.32 (s, 3H), 0.94 (s, 9H), 0.17 (d, J=2.2 Hz, 6H).

[0268] Preparation of (4): To a mixture of 3 (5.7 g, 10.80 mmol) in CD₃OD (120 mL) was added NaBD₄ (1.63 g, 43.21 mmol) in portions at 0° C., and the mixture was stirred at 20° C. for 1 hr. Upon completion as monitored by LCMS, the reaction mixture was neutralized by AcOH (˜10 mL) and concentrated under reduced pressure to give a residue. The residue was purified by flash silica gel chromatography (ISCO®; 40 g SepaFlash® Silica Flash Column, Eluent of 0˜5%, MeOH/DCM gradient @40 mL/min) to give 4 (4.15 g, 7.61 mmol, 70.45% yield) as a yellow solid. ESI-LCMS: 502.2 [M+H]⁺; ¹H NMR (400 MHz, DMSO-d₆) δ=11.23 (s, 1H), 8.76 (s, 2H), 8.04 (d, J=7.3 Hz, 2H), 7.69-7.62 (m, 1H), 7.60-7.52 (m, 2H), 6.14 (d, J=6.0 Hz, 1H), 5.18 (s, 1H), 4.60-4.51 (m, 2H), 3.98 (d, J=3.0 Hz, 1H), 3.32 (s, 3H), 0.92 (s, 9H), 0.13 (d, J=1.5 Hz, 6H).

[0269] Preparation of (5): To a solution of 4 (4.85 g, 9.67 mmol) in pyridine (50 mL) was added DMTrCl (5.90 g, 17.40 mmol) at 25° C. and the mixture was stirred for 2 hr. Upon completion as monitored by LCMS, the reaction mixture was concentrated under reduced pressure to remove pyridine. The residue was diluted with EtOAc (150 mL) and washed with H₂O (50 mL*3), dried over Na₂SO₄, filtered and concentrated under reduced pressure to give a residue. The residue was purified by flash silica gel chromatography (ISCO®; 80 g SepaFlash® Silica Flash Column, Eluent of 0˜70%, EA/PE gradient @60 mL/min) to give 5 (6.6 g, 84.06% yield) as a yellow solid. ESI-LCMS: 804.3[M+H]⁺, ¹H NMR (400 MHz, DMSO-d₆) δ=11.22 (s, 1H), 8.68 (d, J=11.0 Hz, 2H), 8.03 (d, J=7.3 Hz, 2H), 7.68-7.60 (m, 1H), 7.58-7.49 (m, 2H), 7.37-7.30 (m, 2H), 7.27-7.16 (m, 7H), 6.88-6.79 (m, 4H), 6.17 (d, J=4.2 Hz, 1H), 4.72 (t, J=5.0 Hz, 1H), 4.60 (t, J=4.5 Hz, 1H), 4.03-3.98 (m, 1H), 3.71 (s, 6H), 0.83 (s, 9H), 0.12-0.03 (m, 6H).

[0270] Preparation of (6): To a solution of 5 (6.6 g, 8.21 mmol) in THF (16 mL) was added TBAF (1 M, 8.21 mL), and the mixture was stirred at 20° C. for 2 hr. Upon completion as monitored by LCMS, the reaction mixture was diluted with EA (150 mL) and washed with H₂O (50 mL*3). The organic layer was washed with brine (150 mL), dried over Na₂SO₄, filtered and concentrated under reduced pressure to give a residue. The residue was purified by flash silica gel chromatography (ISCO®; 80 g SepaFlash® Silica Flash Column, Eluent of 10-100%, EA/PE gradient @30 mL/min) to give 6 (5.4 g, 94.4% yield) as a yellow solid. ESI-LCMS: 690.3 [M+H]⁺; ¹H NMR (400 MHz, DMSO-d₆) δ=11.24 (s, 1H), 8.69 (s, 1H), 8.62 (s, 1H), 8.05 (d, J=7.3 Hz, 2H), 7.69-7.62 (m, 1H), 7.60-7.52 (m, 2H), 7.40-7.33 (m, 2H), 7.30-7.18 (m, 7H), 6.84 (dd, J=5.9, 8.9 Hz, 4H), 6.19 (d, J=4.8 Hz, 1H), 5.36 (d, J=6.0 Hz, 1H), 4.59-4.52 (m, 1H), 4.48 (q, J=5.1 Hz, 1H), 4.11 (d, J=4.8 Hz, 1H), 3.72 (d, J=1.0 Hz, 6H), 3.40 (s, 3H).

[0271] Preparation of (Example 6 monomer): To a solution of 6 (8.0 g, 11.60 mmol) in MeCN (150 mL) was added P-1 (4.54 g, 15.08 mmol, 4.79 mL) at 0° C., followed by DCI (1.51 g, 12.76 mmol) in one portion. The mixture was warmed to 20° C. and stirred for 2 h. Upon completion as monitored by LCMS, the reaction mixture was quenched by addition of saturated aq·NaHCO₃ (50 mL) and diluted with DCM (250 mL). The organic layer was washed with saturated aq·NaHCO₃ (50 mL*2), dried over Na₂SO₄, filtered and concentrated under reduced pressure. The residue was purified by a flash silica gel column (0% to 60% EA in PE contain 0.5% TEA) to give Example 6 monomer (5.75 g, 55.37% yield, 99.4% purity) as a white solid. ESI-LCMS: 890.4 [M+H]⁺; ¹H NMR (400 MHz, CD₃CN) δ=9.55 (s, 1H), 8.63-8.51 (m, 1H), 8.34-8.24 (m, 1H), 7.98 (br d, J=7.5 Hz, 2H), 7.65-7.55 (m, 1H), 7.53-7.46 (m, 2H), 7.44-7.37 (m, 2H), 7.32-7.17 (m, 7H), 6.84-6.77 (m, 4H), 6.14 (d, J=4.3 Hz, 1H), 4.84-4.73 (m, 1H), 4.72-4.65 (m, 1H), 4.34-4.27 (m, 1H), 3.91-3.61 (m, 9H), 3.50-3.43 (m, 3H), 2.72-2.61 (m, 1H), 2.50 (t, J=6.0 Hz, 1H), 1.21-1.15 (m, 10H), 1.09 (d, J=6.8 Hz, 2H); ³¹P NMR (162 MHz, CD₃CN) δ=150.01, 149.65

### Example 7: Synthesis of 5′ End Cap Monomer

[chemical structure]

[chemical structure]

### Example 7 Monomer Synthesis Scheme

[0272] Preparation of (2): To a solution of 1 (10 g, 27.22 mmol) in CH₃CN (200 mL) and H₂O (50 mL) were added TEMPO (3.85 g, 24.50 mmol) and DIB (17.54 g, 54.44 mmol). The mixture was stirred at 25° C. for 12 h. Upon completion as monitored by LCMS, the reaction mixture was concentrated under reduced pressure to give a residue. The residue was triturated with EtOAc (600 mL) for 30 min. The resulting suspension was filtered and the collected solid was washed with EtOAc (300 mL*2) to give 2 (20.09 g, 91.5% yield) as a white solid. ESI-LCMS: 382.0 [M+H]⁺.

[0273] Preparation of (3): To a solution of 2 (6 g, 15.73 mmol) in MeOH (100 mL) was added SOCl₂ (2.81 g, 23.60 mmol, 1.71 mL) dropwise at 0° C. The mixture was stirred at 25° C. for 12 h. Upon completion as monitored by LCMS, the reaction mixture was quenched by addition of NaHCO₃ (4 g) and stirred at 25° C. for 30 min. The reaction mixture was filtered and the filtrate was concentrated under reduced pressure to give 3 (18.8 g, 95.6% yield) as a white solid. The crude product was used for the next step without further purification. (The reaction was set up in parallel 3 batches and combined). ESI-LCMS: 396.1 [M+H]⁺; ¹H NMR (400 MHz, DMSO-d₆) δ=12.26-11.57 (m, 2H), 8.42-8.06 (m, 1H), 6.14-5.68 (m, 2H), 4.56 (s, 2H), 4.33 (dd, J=4.0, 7.3 Hz, 1H), 3.77 (m, 3H), 3.30 (s, 3H), 2.81-2.69 (m, 1H), 1.11 (s, 6H)

[0274] Preparation of (4 & 5): To a mixture of 3 (10.1 g, 25.55 mmol) in CD₃OD (120 mL) was added NaBD₄ (3.29 g, 86.86 mmol, 3.4 eq) in portions at 0° C. The mixture was stirred at 25° C. for 1 h. Upon completion as monitored by LCMS, the reaction mixture was neutralized with AcOH (˜15 mL) and concentrated under reduced pressure to give a residue. The residue was purified by flash silica gel chromatography (ISCO®; 120 g SepaFlash® Silica Flash Column, Eluent of 0˜7.4%, MeOH/DCM gradient @80 mL/min) to give 4 (2.98 g, 6.88 mmol, 27% yield) as a yellow solid. ESI-LCMS: 370.1[M+H]⁺ and 5 (10.9 g, crude) as a yellow solid. ESI-LCMS: 300.1[M+H]⁺; ¹H NMR (400 MHz, CD₃OD) δ=7.85 (s, 1H), 5.87 (d, J=6.0 Hz, 1H), 4.46-4.39 (m, 1H), 4.34 (t, J=5.4 Hz, 1H), 4.08 (d, J=3.1 Hz, 1H), 3.49-3.38 (m, 4H)

[0275] Preparation of 6: To a solution of 4 (1.9 g, 4.58 mmol, 85.7% purity) in pyridine (19 mL) was added DMTrCl (2.02 g, 5.96 mmol). The mixture was stirred at 25° C. for 2 h under N₂. Upon completion as monitored by LCMS, the reaction mixture was quenched by MeOH (10 mL) and concentrated under reduce pressure to give a residue. The residue was diluted with H₂O (10 mL*3) and extracted with EA (20 mL*3). The combined organic layers were washed with brine (20 mL), dried over anhydrous Na₂SO₄, filtered and concentrated under reduce pressure to give a residue. The residue was purified by flash silica gel chromatography (ISCO®; 25 g SepaFlash® Silica Flash Column, Eluent of 0˜77%, PE:(EA with 10% EtOH): 1% TEA@35 mL/min) to give 6 (2.6 g, 81.71% yield, 96.71% purity) as a white foam. ESI-LCMS: 672.2 [M+H]⁺; ¹H NMR (400 MHz, CDCl₃) δ=12.02 (s, 1H), 7.96 (s, 1H), 7.83 (s, 1H), 7.51 (d, J=7.4 Hz, 2H), 7.37 (d, J=8.6 Hz, 4H), 7.25-7.17 (m, 2H), 6.80 (t, J=8.4 Hz, 4H), 5.88 (d, J=6.3 Hz, 1H), 4.69 (t, J=5.7 Hz, 1H), 4.64 (s, 1H), 4.54 (s, 1H), 4.19 (d, J=2.9 Hz, 1H), 3.77 (d, J=4.5 Hz, 6H), 3.60-3.38 (m, 3H), 2.81 (s, 1H), 1.81 (td, J=6.9, 13.7 Hz, 1H), 0.97 (d, J=6.8 Hz, 3H), 0.80 (d, J=6.9 Hz, 3H).

[0276] Preparation of Example 7 monomer: To a solution of 6 (8.4 g, 12.5 mmol) in MeCN (80 mL) was added P-1 (4.9 g, 16.26 mmol, 5.16 mL) at 0° C., followed by addition of DCI (1.624 g, 13.76 mmol) in one portion at 0° C. under Ar. The mixture was stirred at 25° C. for 2 h. Upon completion as monitored by LCMS, the reaction mixture was quenched with saturated aq·NaHCO₃ (20 mL) and extracted with DCM (50 mL*2). The combined organic layers were dried over anhydrous Na₂SO₄, filtered and concentrated under reduce pressure to give a residue. The residue was purified by flash silica gel chromatography (ISCO®; 40 g SepaFlash® Silica Flash Column, Eluent of 0˜52% PE:EA (10% EtOH): 5% TEA, @80 mL/min) to give Example 7 monomer (3.4 g, 72.1% yield) as a white foam. ESI-LCMS: 872.4 [M+H]⁺; ¹H NMR (400 MHz, CD₃CN) δ=12.46-11.07 (m, 1H), 9.29 (s, 1H), 7.84 (d, J=14.6 Hz, 1H), 7.42 (t, J=6.9 Hz, 2H), 7.34-7.17 (m, 7H), 6.85-6.77 (m, 4H), 5.95-5.77 (m, 1H), 4.56-4.40 (m, 2H), 4.24 (dd, J=4.0, 13.3 Hz, 1H), 3.72 (d, J=2.0 Hz, 7H), 3.66-3.53 (m, 3H), 3.42 (d, J=11.8 Hz, 3H), 2.69-2.61 (m, 1H), 2.60-2.42 (m, 2H), 1.16-1.00 (m, 18H); ³¹P NMR (162 MHz, CD₃CN) δ=149.975, 149.9.

### Example 8: Synthesis of 5′ End Cap Monomer

[chemical structure]

[chemical structure]

### Example 8 Monomer Synthesis Scheme

[0277] Preparation of (2): To a solution of 1 (40 g, 58.16 mmol) in DMF (60 mL) were added imidazole (11.88 g, 174.48 mmol), NaI (13.08 g, 87.24 mmol), and TBSCl (17.52 g, 116.32 mmol) at 20° C. in one portion. The reaction mixture was stirred at 20° C. for 12 h. Upon completion, the mixture was diluted with EA (200 mL). The organic layer was washed with brine/water (80 mL/80 mL*4), dried over Na₂SO₄, filtered and evaporated to give 2 (50.8 g, crude) as yellow solid. ESI-LCMS: 802.3 [M+H]⁺

[0278] Preparation of (3): To a solution of 2 (8.4 g, 10.47 mmol) in DCM (120 mL) were added Et₃S¹H (3.06 g, 26.3 mmol, 4.2 mL) and TFA (1.29 g, 0.84 mL) dropwise at 0° C. The reaction mixture was stirred at 20° C. for 2 h. The reaction mixture was washed with saturated aq·NaHCO₃ (15 mL) and brine (80 mL). The organic layer was dried over Na₂SO₄, filtered and evaporated. The residue was purified by flash silica gel chromatography (ISCO@; 80 g SepaFlash® Silica Flash Column, Eluent of 0˜83% EA/PE gradient @80 mL/min) to give 3 (2.92 g, 55.8% yield,) as a white solid. ESI-LCMS: 500.2 [M+H]⁺; ¹H NMR (400 MHz, CDCl₃) δ=8.79 (s, 1H), 8.14 (s, 1H), 8.02 (d, J=7.6 Hz, 2H), 7.64-7.58 (m, 1H), 7.56-7.49 (m, 2H), 5.98-5.93 (m, 1H), 4.63-4.56 (m, 2H), 4.23 (s, 1H), 3.98 (dd, J=1.5, 13.1 Hz, 1H), 3.75 (dd, J=1.5, 13.1 Hz, 1H), 3.28 (s, 3H), 2.06-1.99 (m, 1H), 1.00-0.90 (m, 9H), 0.15 (d, J=7.0 Hz, 6H).

[0279] Preparation of (4): 3 (6 g, 12.01 mmol) and tert-butyl N-methylsulfonylcarbamate (3.52 g, 18.01 mmol) were co-evaporated with toluene (50 mL), dissolved in dry THF (100 mL), and cooled to 0° C. PPh₃ (9.45 g, 36.03 mmol,) was then added, followed by dropwise addition of DIAD (7.28 g, 36.03 mmol, 7.00 mL) in dry THF (30 mL). The reaction mixture was stirred at 20° C. for 18 h. Upon completion, the reaction mixture was then diluted with DCM (100 mL) and washed with water (70 mL) and brine (70 mL), dried over Na₂SO₄, filtered and evaporated to give a residue. The residue was purified by flash silica gel chromatography (ISCO®; 80 g SepaFlash® Silica Flash Column, Eluent of 0˜100% Ethyl acetate/Petroleum ether gradient @60 mL/min) followed by reverse-phase HPLC (0.1% NH₃·H₂O condition, eluent at 74%) to give 4 (2.88 g, 25% yield) as a white solid. ESI-LCMS: 677.1 [M+H]⁺; ¹H NMR (400 MHz, CDCl₃) δ=9.24 (s, 1H), 8.84 (s, 1H), 8.36 (s, 1H), 8.05 (br d, J=7.3 Hz, 2H), 7.66-7.42 (m, 4H), 6.16 (d, J=5.0 Hz, 1H), 4.52 (br t, J=4.5 Hz, 1H), 4.25-4.10 (m, 1H), 3.97 (br dd, J=8.0, 14.8 Hz, 1H), 3.48 (s, 3H), 3.27 (s, 3H), 1.54 (s, 9H), 0.95 (s, 9H), 0.14 (d, J=0.8 Hz, 6H).

[0280] Preparation of (5): To a solution of 4 (2.8 g, 4.14 mmol) in THF (20 mL) was added TBAF (4 M, 1.03 mL) and the mixture was stirred at 20° C. for 12 h. The reaction mixture was then evaporated. The residue was purified by flash silica gel chromatography (ISCO®; 12 g SepaFlash® Silica Flash Column, Eluent of 0˜6% MeOH/ethyl acetate gradient @20 mL/min) to give 5 (2.1 g, 83.92% yield) as a white solid. ESI-LCMS: 563.1[M+H]⁺; ¹H NMR (400 MHz, CDCl₃) δ=8.85-8.77 (m, 1H), 8.38 (s, 1H), 8.11-7.99 (m, 2H), 7.64-7.50 (m, 4H), 6.19 (d, J=2.8 Hz, 1H), 4.36-4.33 (m, 1H), 4.29 (br d, J=4.3 Hz, 1H), 4.22-4.02 (m, 2H), 3.65-3.59 (m, 3H), 3.28 (s, 3H), 1.54 (s, 9H).

[0281] Preparation of (6): To a solution of 5 (2.1 g, 3.73 mmol) in DCM (20 mL) was added TFA (7.70 g, 67.53 mmol, 5 mL) at 0° C. The reaction mixture was stirred at 20° C. for 24 h. Upon completion, the reaction was quenched with saturated aq·NaHCO₃ to reach pH 7. The organic layer was dried over Na₂SO₄, filtered, and evaporated at low pressure. The residue was purified by flash silica gel chromatography (ISCO@; 12 g SepaFlash® Silica Flash Column, Eluent of 0˜7% DCM/MeOH gradient @20 mL/min) to give 1.6 g (impure, 75% LCMS purity), followed by prep-HPLC [FA condition, column: Boston Uni C18 40*150*5 um; mobile phase: [water (0.225% FA)-ACN]; B %: 8%-38%, 7.7 min.] to give 6 (1.04 g, 63.7% yield) as a white solid. ESI-LCMS: 485.0 [M+Na]⁺; ¹H NMR (400 MHz, DMSO-d₆) δ=11.27-11.21 (m, 1H), 8.77 (s, 1H), 8.74 (s, 1H), 8.05 (d, J=7.3 Hz, 2H), 7.68-7.62 (m, 1H), 7.59-7.53 (m, 2H), 7.39 (t, J=6.3 Hz, 1H), 6.16 (d, J=6.0 Hz, 1H), 5.48 (d, J=5.5 Hz, 1H), 4.55 (t, J=5.5 Hz, 1H), 4.43-4.37 (m, 1H), 4.08-4.02 (m, 1H), 3.41-3.36 (m, 1H), 3.35 (s, 3H), 3.31-3.22 (m, 1H), 2.91 (s, 3H).

[0282] Preparation of (Example 8 monomer): To a solution of 6 (1 g, 2.16 mmol) in DCM (30 mL) was added P1 (977.58 mg, 3.24 mmol, 1.03 mL), followed by DCI (306.43 mg, 2.59 mmol) at 0° C. in one portion under Ar atmosphere. The mixture was degassed and purged with Ar for 3 times, warmed to 20° C., and stirred for 2 hr under Ar atmosphere. Upon completion as monitored by LCMS and TLC (PE:EtOAc=4:1), the reaction mixture was diluted with sat·aq·NaHCO₃ (30 mL) and extracted with DCM (50 mL*2). The combined organic layers were dried over anhydrous Na₂SO₄, filtered, and the filtrate was concentrated under reduced pressure to give a residue. The crude product was purified by reversed-phase HPLC (40 g C18 column: neutral condition, Eluent of 0˜57% of 0.3% NH₄HCO₃ in H₂O/CH₃CN ether gradient @35 mL/min) to give Example 8 monomer (0.49 g, 33.7% yield) as a white solid. ESI-LCMS: 663.1[M+H]⁺; ¹H NMR (400 MHz, CD₃CN) δ=1.19-1.29 (m, 12H) 2.71 (q, J=5.77 Hz, 2H) 2.94 (d, J=6.27 Hz, 3H) 3.35 (d, J=15.56 Hz, 3H) 3.40-3.52 (m, 2H) 3.61-3.97 (m, 4H) 4.23-4.45 (m, 1H) 4.55-4.74 (m, 2H) 6.02 (dd, J=10.67, 6.40 Hz, 1H) 7.25 (br s, 1H) 7.47-7.57 (m, 2H) 7.59-7.68 (m, 1H) 8.01 (d, J=7.78 Hz, 2H) 8.28 (s, 1H) 8.66 (s, 1H) 9.69 (br s, 1H); ³¹P NMR (162 MHz, CD₃CN) δ=150.92, 149.78.

### Example 9. Synthesis of 5′-Stabilized End Cap Modified Oligonucleotides

[0283] This example provides an exemplary method for synthesizing the siNAs comprising a 5′-stabilized end caps disclosed herein. The 5′-stabilized end cap and/or deuterated phosphoramidites were dissolved in anhydrous acetonitrile and oligonucleotide synthesis was performed on a Expedite 8909 Synthesizer using standard phosphoramidite chemistry. An extended coupling (12 minutes) of 0.12 M solution of phosphoramidite in anhydrous CH₃CN in the presence of Benzyl-thio-tetrazole (BTT) activator to a solid bound oligonucleotide followed by standard capping, oxidation and sulfurization produced modified oligonucleotides. The 0.02 M 12, THF:Pyridine; Water 7:2:1 was used as an oxidizing agent, while DDTT (dimethylamino-methylidene)amino)-3H-1,2,4-dithiazaoline-3-thione was used as the sulfur-transfer agent for the synthesis of oligoribonucleotide with a phosphorothioate backbone. The stepwise coupling efficiency of all modified phosphoramidites was achieved around 98%. After synthesis the solid support was heated with aqueous ammonia (28%) solution at 45° C. for 16 h or 0.05 M K2CO3 in methanol was used to deprotect the base labile protecting groups. The crude oligonucleotides were precipitated with isopropanol and centrifuged (Eppendorf 5810R, 3000 g, 4° C., 15 min) to obtain a pellet. The crude product was then purified using ion exchange chromatography (TSK gel column, 20 mM NaH₂PO₄, 10% CH₃CN, 1 M NaBr, gradient 20-60% 1 M NaBr over 20 column volumes) and fractions were analyzed by ion change chromatography on an HPLC. Pure fractions were pooled and desalted by Sephadex G-25 column and evaporated to dryness. The purity and molecular weight were determined by HPLC analysis and ESI-MS analysis. Single strand RNA oligonucleotides (sense and antisense strand) were annealed (1:1 by molar equivalents) at 90° C. for 3 min followed by RT 40 min) to produce the duplexes.

### Example 10. Synthesis of Monomer

[chemical structure]

[chemical structure]

[0284] Preparation of (2a): To a solution of 1a (10.0 g, 29.5 mmol) in ACN (200.0 mL), KSAc (13.5 g, 118.6 mmol) was added at r.t., the mixture was stirred at r.t. for 15 h, TLC showed 1a was consumed completely. Mixture was filtered by silica gel and filter cake was washed with DCM (100.0 mL), the filtrate was concentrated to give crude 2a (11.1 g) as an oil. ¹H-NMR (400 MHz, CDCl₃): δ 7.32-7.24 (m, 5H), 7.16 (d, J=8.9 Hz, 4H), 6.82 (d, J=8.9 Hz, 4H), 3.82 (s, 6H), 2.28 (s, 3H).

[0285] Preparation of (3a): To a solution of crude 2a (11.1 g, 29.2 mmol) in THF (290.0 mL), LiAlH₄ (2.0 g, 52.6 mmol) was added at 0° C. and kept for 10 min, reaction was stirred at r.t. for 5 h under N₂, TLC showed 2a was consumed completely. Mixture was put into aqueous NaHCO₃ solution and extracted with EA (500.0 mL*2), organic phase was concentrated to give crude which was purified by column chromatography (SiO2, PE/EA=30:1 to 10:1) to give 3a (8.1 g, 95% purity) as a white solid. ESI-LCMS: m/z 335.3 [M−H]⁻; ¹H-NMR (400 MHz, CDCl₃): δ 7.33-7.24 (m, 5H), 7.19 (d, J=8.8 Hz, 4H), 6.82 (d, J=8.8 Hz, 4H), 3.83 (s, 6H), 3.09 (s, 1H).

[0286] Preparation of (2): To a solution of 1 (20.0 g, 81.3 mmol) in pyridine (400.0 mL), MsCl (10.23 g, 89.43 mmol) was added dropwise at −10° C., reaction was stirred at −10° C. for 1 h, LCMS showed 1 was consumed completely, 100.0 mL aqueous NaHCO₃ solution was added and extracted with DCM (100.0 mL*2), organic phase was concentrated to give crude which was purified by column chromatography (SiO2, DCM/MeOH=30:1 to 10:1) to give 2 (9.5 g, 97% purity) as a white solid. ESI-LCMS: m/z 325.3 [M+H]⁺; ¹H-NMR (400 MHz, DMSO-d₆): δ 11.45 (s, 1H), 7.64-7.62 (d, J=8.0 Hz, 1H), 5.92-5.85 (m, 2H), 5.65-5.63 (d, J=8.0 Hz, 1H), 5.26-5.11 (m, 1H), 4.53-4.37 (m, 2H), 4.27-4.16 (m, 1H), 4.10-4.04 (m, 1H), 3.23 (s, 3H).

[0287] Preparation of (3): Intermediate 3 was prepared by prepared according to reaction condition described in reference Helvetica Chimica Acta, 2004, 87.2812. To a solution of 2 (9.2 g, 28.3 mmol) in dry DMSO (130.0 mL). DMTrSH (14.31 g, 42.5 mmol) was added, followed by tetramethylguanidine (3.6 g, 31.2 mmol) was added under N₂, reaction was stirred at r.t. for 3 h, LCMS showed 2 was consumed completely. 100.0 mL H₂O was added and extracted with EA (100.0 mL*2), organic phase was concentrated to give crude which was purified by column chromatography (SiO2, PE/EA=5:1 to 1:1) to give 3 (12.0 g, 97% purity) as a white solid. ESI-LCMS: m/z 563.2 [M−H]⁻; ¹H-NMR (400 MHz, DMSO-d₆): δ 11.43-11.42 (d, J=4.0 Hz, 1H), 7.57-7.55 (d, J=8.0 Hz, 1H), 7.33-7.17 (m, 9H), 6.89-6.86 (m, 4H), 5.80-5.74 (m, 1H), 5.65-5.62 (m, 1H), 5.58-5.57 (d, J=4.0 Hz, 1H), 5.16-5.01 (m, 1H), 3.98-3.90 (m, 1H), 3.73 (s, 6H), 3.73-3.67 (m, 1H), 2.50-2.37 (m, 2H).

[0288] Preparation of Example 10 monomer: To a solution of 3 (10.0 g, 17.7 mmol) in dichloromethane (120.0 mL) with an inert atmosphere of nitrogen was added CEOP[N(iPr)₂]₂ (6.4 g, 21.2 mmol) and DCI (1.8 g, 15.9 mmol) in order at room temperature. The resulting solution was stirred for 1.0 h at room temperature and diluted with 50 mL dichloromethane and washed with 2×50 mL of saturated aqueous sodium bicarbonate and 1×50 mL of saturated aqueous sodium chloride respectively. The organic phase was dried over anhydrous sodium sulfate, filtered and concentrated till no residual solvent left under reduced pressure. The residue was purified by Flash-Prep-HPLC with the following conditions (IntelFlash-1): Column, C18 silica gel; mobile phase, CH₃CN/H₂O (0.5% NH₄HCO₃)=1/1 increasing to CH₃CN/H₂O (0.5% NH₄HCO₃)=1/0 within 20 min, the eluted product was collected at CH₃CN/H₂O (0.5% NH₄HCO₃)=6/1; Detector, UV 254 nm. This resulted in to give Example 10 monomer (12.8 g, 98% purity, 93% yield) as an oil. ESI-LCMS: m/z 765.2 [M+H]⁺; ¹H-NMR (400 MHz, DMSO-d₆): δ 11.44 (s, 1H), 7.70-7.66 (m, 1H), 7.32-7.18 (m, 9H), 6.89-6.85 (m, 4H), 5.80-5.64 (m, 2H), 5.38-5.22 (m, 1H), 4.38-4.15 (m, 1H), 3.81-3.70 (m, 8H), 3.61-3.43 (m, 3H), 2.76-2.73 (m, 1H), 2.66-2.63 (m, 1H), 2.50-2.41 (m, 2H), 1.12-1.05 (m, 9H), 0.97-0.95 (m, 3H); ³¹P-NMR (162 MHz, DMSO-d₆): δ 149.01, 148.97, 148.74, 148.67; ¹⁹F-NMR (376 MHz, DMSO-d₆): δ 149.01, 148.97, 148.74, 148.67.

### Example 11. Synthesis of Monomer

[chemical structure]

[0289] Preparation of (2): To a stirred solution of 1 (2.0 g, 8.8 mmol) in pyridine (20 mL) were added DMTrCl (3.3 g, 9.7 mmol) at r.t. The reaction mixture was stirred at r.t. for 2.5 hrs. With ice-bath cooling, the reaction was quenched with water and the product was extracted with EA (100 mL). The organic phase was evaporated to dryness under reduced pressure to give a residue which was purified by silica gel column chromatography (eluent, DCM:MeOH=50:1˜20:1) to give 2 (3.7 g, 7.2 mmol, 80.1%) as a white solid. ESI-LCMS: m/z 527 [M−H].

[0290] Preparation of (3): To the solution of 2 (2.8 g, 5.3 mmol) in dry DMF (56 mL) was added (CD₃₀)₂Mg (2.9 g, 31.8 mmol) at r.t. under N₂ atmosphere. The reaction mixture was stirred at 100° C. for 15 hrs. With ice-bath cooling, the reaction was quenched with saturated aq. NH₄C1 and extracted with EA (300 mL). The combined organic layer was washed with water and brine, dried over Na₂SO₄, and concentrated to give a residue which was purified by Flash-Prep-HPLC with the following conditions (IntelFlash-1): Column, C18 silica gel; mobile phase, CH₃CN/H₂O (0.5% NH₄HCO₃)=2/3 increasing to CH₃CN/H₂O (0.5% NH₄HCO₃)=3/2 within 20 min, the eluted product was collected at CH₃CN/H₂O (0.5% NH₄HCO₃)=1/1; Detector, UV 254 nm. This resulted in to give 3 (2.0 g, 3.6 mmol, 67.9%) as a white solid. ESI-LCMS: m/z 562 [M−H]⁻; ¹H-NMR (400 MHz, DMSO-d₆): δ 11.38 (s, 1H), 7.73 (d, J=8 Hz, 1H), 7.46-7.19 (m, 9H), 6.91 (d, J=7.4 Hz, 4H), 5.81-5.76 (AB, J=20 Hz, 1H), 5.30 (d, J=8 Hz, 1H), 5.22 (s, 1H), 4.25-4.15 (m, 1H), 3.99-3.92 (m, 1H), 3.85-3.79 (m, 1H), 3.74 (s, 6H), 3.34-3.18 (m, 31H).

[0291] Preparation of Example 11 monomer: To a suspension of 3 (2.0 g, 3.5 mmol) in DCM (20 mL) was added DCI (357 mg, 3.0 mmol) and CEP[N(iPr)₂]₂ (1.3 g, 4.3 mmol). The mixture was stirred at r.t. for 1 h. LC-MS showed 3 was consumed completely. The solution was washed with water twice and washed with brine and dried over Na₂SO₄. Then concentrated to give a residue which was purified by Flash-Prep-HPLC with the following conditions (IntelFlash-1): Column, C18 silica gel; mobile phase, CH₃CN/H₂O (0.5% NH₄HCO₃)=1/1 increasing to CH₃CN/H₂O (0.5% NH₄HCO₃)=1/0 within 20 min, the eluted product was collected at CH₃CN/H₂O (0.5% NH₄HCO₃)=1/0; Detector, UV 254 nm. This resulted in to give Example 11 monomer (2.1 g, 2.7 mmol, 77.1%) as a white solid. ESI-LCMS: m/z 764 [M+H]⁺; ¹H-NMR (400 MHz, ACN-d₃): δ 9.45-8.90 (m, 1H, exchanged with D₂O), 7.88-7.66 (m, 1H), 7.50-7.18 (m, 9H), 6.93-6.80 (m, 4H), 5.85 (d, J=8.2 Hz, 1H), 5.29-5.16 (m, 1H), 4.57-4.37 (m, 1H), 4.18-4.09 (m, 1H), 3.98-3.90 (m, 1H), 3.90-3.74 (m, 7H), 3.74-3.50 (m, 3H), 3.48-3.31 (m, 2H), 2.70-2.61 (m, 1H), 2.56-2.46 (m, 1H), 1.24-1.12 (m, 9H), 1.09-0.99 (m, 3H). ³¹P-NMR (162 MHz, ACN-d₃): δ=149.87, 149.55.

### Example 12. Synthesis of Monomer

[chemical structure]

[chemical structure]

[0292] Preparation of (2): To the solution of 1 (39.2 g, 151.9 mmol) in DMF (390.0 mL) was added imidazole (33.0 g, 485.3 mmol) and TBSCl (57.2 g, 379.6 mmol) at 0° C. The reaction mixture was stirred at room temperature for 15 hrs under N₂ atmosphere. After addition of water, the resulting mixture was extracted with EA (500.0 mL). The combined organic layer was washed with water and brine, dried over Na₂SO₄, concentrated to give the crude 2 (85.6 g) as a white solid which was used directly for next step. ESI-LCMS: m/z 487.7 [M+H]⁺.

[0293] Preparation of (3): A solution of crude 2 (85.6 g) in a mixture solvent of TFA/H₂O=1/1 (400.0 mL) and THF (400.0 mL) was stirred at 0° C. for 30 min. After completion of reaction, the resulting mixture was added con·NH₃*H₂O to pH=7, and then extracted with EA (500.0 mL). The organic layer was washed with brine, dried over sodium sulfate and removed to give the residue was purified by Flash-Prep-HPLC with the following conditions (IntelFlash-1): Column, C18 silica gel; mobile phase, CH₃CN/H₂O (0.5% NH₄HCO₃)=2/3 increasing to CH₃CN/H₂O (0.5% NH₄HCO₃)=3/2 within 20 min, the eluted product was collected at CH₃CN/H₂O (0.5% NH₄HCO₃)=1/1; Detector, UV 254 nm. This resulted in to give 3 (36.6 g, 98.4 mmol, 64.7% over two step) as a white solid. ESI-LCMS: m/z 372.5 [M+H]⁺; ¹H-NMR (400 MHz, DMSO-d₆): δ 11.36 (d, J=1 Hz, 1H), 7.92 (d, J=8 Hz, 1H), 5.83 (d, J=5 Hz, 1H), 5.67-5.65 (m, 1H), 5.19 (s, 1H), 4.30 (t, J=5 Hz, 1H), 3.85-3.83 (m, 2H), 3.68-3.52 (m, 2H), 0.88 (s, 9H), 0.09 (s, 6H).

[0294] Preparation of (4): To the solution of 3 (36.6 g, 98.4 mmol) in dry DCM (200.0 mL) and DMF (50.0 mL) was added PDC (73.9 g, 196.7 mmol), tert-butyl alcohol (188.0 mL) and Ac₂O (93.0 mL) at r.t under N₂ atmosphere, the reaction mixture was stirred at r.t for 2 hrs. The solvent was removed to give a residue which was purified by silica gel column chromatography (eluent, PE/EA=4:1˜2:1) to give a residue which was purified by Flash-Prep-HPLC with the following conditions (IntelFlash-1): Column, C18 silica gel; mobile phase, CH₃CN/H₂O (0.5% NH₄HCO₃)=1/1 increasing to CH₃CN/H₂O (0.5% NH₄HCO₃)=1/0 within 20 min, the eluted product was collected at CH₃CN/H₂O (0.5% NH₄HCO₃)=1/0; Detector, UV 254 nm. This resulted in to give 4 (24.3 g, 54.9 mmol, 55.8%) as a white solid. ESI-LCMS: m/z 443.2 [M+H]⁺; ¹H-NMR (400 MHz, DMSO-d₆): δ 11.30 (d, J=1 Hz, 1H), 7.92 (d, J=8 Hz, 1H), 5.86 (d, J=6 Hz, 1H), 5.67-5.65 (m, 1H), 4.33-4.31 (m, 1H), 4.13 (d, J=3 Hz, 1H), 3.73-3.70 (m, 1H), 1.34 (s, 9H), 0.77 (s, 9H), 0.08 (s, 6H).

[0295] Preparation of (5): To the solution of 4 (18.0 g, 40.7 mmol) in dry THF/MeOD/D₂O=10/2/1 (145.0 mL) was added NaBD₄ (5.1 g, 122.1 mmol) three times during an hour at 50° C., the reaction mixture was stirred at r.t. for 2 hrs. After completion of reaction, adjusted pH value to 7 with CH₃COOD, after addition of water, the resulting mixture was extracted with EA (300.0 mL). The combined organic layer was washed with water and brine, dried over Na₂SO₄, concentrated to give a residue which was purified by Flash-Prep-HPLC with the following conditions (IntelFlash-1): Column, C18 silica gel; mobile phase, CH₃CN/H₂O (0.5% NH₄HCO₃)=2/3 increasing to CH₃CN/H₂O (0.5% NH₄HCO₃)=3/2 within 20 min, the eluted product was collected at CH₃CN/H₂O (0.5% NH₄HCO₃)=1/1; Detector, UV 254 nm. This resulted in to give 5 (10.4 g, 27.8 mmol, 68.3%) as a white solid. ESI-LCMS: m/z 375.2 [M+H]⁺; ¹H-NMR (400 MHz, DMSO-d₆): δ 11.36 (d, J=1 Hz, 1H), 7.92 (d, J=8 Hz, 1H), 5.83 (d, J=5 Hz, 1H), 5.67-5.65 (m, 1H), 5.19 (s, 1H), 4.30 (t, J=5 Hz, 1H), 3.85-3.83 (m, 2H), 0.88 (s, 9H), 0.09 (s, 6H).

[0296] Preparation of (6): To a stirred solution of 5 (10.4 g, 27.8 mmol) in pyridine (100.0 mL) was added DMTrCl (12.2 g, 36.1 mmol) at r.t., The reaction mixture was stirred at r.t. for 2.5 hrs, the reaction was quenched with water and extracted with EA (200.0 mL). The organic phase was evaporated to dryness under reduced pressure to give a residue which was purified by Flash-Prep-HPLC with the following conditions (IntelFlash-1): Column, C18 silica gel; mobile phase, CH₃CN/H₂O (0.5% NH₄HCO₃)=1/1 increasing to CH₃CN/H₂O (0.5% NH₄HCO₃)=1/0 within 20 min, the eluted product was collected at CH₃CN/H₂O (0.5% NH₄HCO₃)=1/0; Detector, UV 254 nm. This resulted in to give 6 (13.5 g, 19.9 mmol, 71.6%) as a white solid. ESI-LCMS: m/z 677.8 [M+H]⁺; ¹H-NMR (400 MHz, DMSO-d₆): δ 11.39 (d, J=1 Hz, 1H), 7.86 (d, J=4 Hz, 1H), 7.35-7.21 (m, 9H), 6.90-6.88 (m, 4H), 5.78 (d, J=2 Hz, 1H), 5.30-5.27 (m, 1H), 4.33-4.30 (m, 1H), 3.91 (d, J=7 Hz, 1H), 3.85-3.83 (m, 1H), 3.73 (s, 6H), 3.38 (s, 3H), 0.77 (s, 9H), 0.03 (s, 3H), 0.01 (s, 3H).

[0297] Preparation of (7): To a solution of 6 (13.5 g, 19.9 mmol) in THF (130.0 mL) was added 1 M TBAF solution (19.0 mL). The reaction mixture was stirred at r.t. for 1.5 hrs. LC-MS showed 6 was consumed completely. Water (500.0 mL) was added and extracted with EA (300.0 mL), the organic layer was washed with brine and dried over Na₂SO₄. Then the organic layer was concentrated to give a residue which was purified by Flash-Prep-HPLC with the following conditions (IntelFlash-1): Column, C18 silica gel; mobile phase, CH₃CN/H₂O (0.5% NH₄HCO₃)=2/3 increasing to CH₃CN/H₂O (0.5% NH₄HCO₃)=3/2 within 20 min, the eluted product was collected at CH₃CN/H₂O (0.5% NH₄HCO₃)=1/1; Detector, UV 254 nm. This resulted in to give 7 (10.9 g, 19.4 mmol, 97.5%) as a white solid. ESI-LCMS: m/z 563.6 [M+H]⁺; ¹H-NMR (400 MHz, DMSO-d₆): δ 11.39 (s, 1H), 7.23 (d, J=8 Hz, 1H), 7.73 (d, J=8 Hz, 1H), 7.36-7.23 (m, 9H), 6.90 (d, J=8 Hz, 4H), 5.81 (d, J=3 Hz, 1H), 5.30-5.28 (m, 1H), 5.22 (d, J=7 Hz, 1H), 4.20 (q, J=7 Hz, 1H), 3.93 (d, J=7 Hz, 1H), 3.81 (t, J=5 Hz, 1H), 3.74 (s, 6H), 3.41 (s, 3H).

[0298] Preparation of Example 12 monomer: To a suspension of 7 (10.9 g, 19.4 mmol) in DCM (100.0 mL) was added DCI (1.8 g, 15.7 mmol) and CEP[N(iPr)₂]₂ (6.1 g, 20.4 mmol). The mixture was stirred at r.t. for 1 h. LC-MS showed 7 was consumed completely. The mixture was washed with water twice and brine, dried over Na₂SO₄. Then concentrated to give a residue which was purified by Flash-Prep-HPLC with the following conditions (IntelFlash-1): Column, C18 silica gel; mobile phase, CH₃CN/H₂O (0.5% NH₄HCO₃)=1/1 increasing to CH₃CN/H₂O (0.5% NH₄HCO₃)=1/0 within 20 min, the eluted product was collected at CH₃CN/H₂O (0.5% NH₄HCO₃)=1/0; Detector, UV 254 nm. This resulted in to give Example 12 monomer (12.5 g, 14.5 mmol, 74.7%) as a white solid. ESI-LCMS: m/z 863.6 [M+H]⁺; ¹H-NMR (400 MHz, DMSO-d₆): δ 11.39 (s, 1H), 7.81-7.55 (m, 1H), 7.40-7.22 (m, 9H), 6.92-6.87 (m, 4H), 5.83-5.80 (m, 1H), 5.32-5.25 (m, 1H), 4.46-4.34 (m, 1H), 4.10-3.98 (m, 2H), 3.84-3.73 (m, 7H), 3.60-3.50 (m, 3H), 3.42, 3.40 (s, 3H), 2.78 (t, J=6 Hz, 1H), 2.62-2.59 (m, 1H), 2.07 (s, 1H), 1.17-0.96 (m, 12H); ³¹P-NMR (162 MHz, DMSO-d₆): δ 149.37, 149.06.

### Example 13. Synthesis of Monomer

[chemical structure]

[0299] Preparation of (2): To the solution of 1 (13.0 g, 52.8 mmol) in DMF (100 mL) was added imidazole (12.6 g, 184.8 mmol) and TBSCl (19.8 g, 132.0 mmol) at 0° C., and the reaction mixture was stirred at room temperature for 15 h under N₂ atmosphere. After addition of water, the resulting product was extracted with EA (500 mL). The combined organic layer was washed with water and brine, dried over Na₂SO₄, and concentrated to give the crude 2 (30.6 g) as a white solid which was used directly for next step. ESI-LCMS: m/z 475 [M+H]⁺. WO2017106710A1

[0300] Preparation of (3): A solution of crude 2 (30.6 g) in a mixture solvent of TFA/H₂O=1/1 (100 mL) and THF (100 mL) was stirred at 0° C. for 30 min. After completion of reaction, the resulting mixture was added con·NH₃*H₂O to pH=7.5, and then the mixture was extracted with EA (500 mL), the organic layer was washed with brine, dried over Na₂SO₄ and removed to give the residue was purified by Flash-Prep-HPLC with the following conditions (IntelFlash-1): Column, C18 silica gel; mobile phase, CH₃CN/H₂O (0.5% NH₄HCO₃)=2/3 increasing to CH₃CN/H₂O (0.5% NH₄HCO₃)=3/2 within 20 min, the eluted product was collected at CH₃CN/H₂O (0.5% NH₄HCO₃)=1/1; Detector, UV 254 nm. This resulted in to give 3 (12.0 g, 33.3 mmol, 65.8% over two step) as a white solid. ESI-LCMS: m/z 361 [M+H]⁺; ¹H-NMR (400 MHz, DMSO-d₆): δ 11.39 (s, J=1 Hz, 1H, exchanged with D₂O), 7.88 (d, J=8 Hz, 1H), 5.91-5.86 (m, 1H), 5.66-5.62 (m, 1H), 5.21 (t, J=5.2 Hz, 1H, exchanged with D₂O), 5.18-5.03 (m, 1H), 4.37-4.29 (m, 1H), 3.87-3.83 (m, 1H), 3.78-3.73 (m, 1H), 3.56-3.51 (m, 1H), 0.87 (s, 9H), 0.09 (s, 6H). WO2017106710A1.

[0301] Preparation of (4): To the solution of 3 (11.0 g, 30.5 mmol) in dry DCM (60 mL) and DMF (15 mL) was added PDC (21. g, 61.0 mmol), tert-butyl alcohol (45 mL) and Ac₂O (32 mL) at r.t under N₂ atmosphere. And the reaction mixture was stirred at r.t for 2 h. The solvent was removed to give a residue which was purified by silica gel column chromatography (eluent, PE:EA=4:1˜2:1) to give a residue which was purified by Flash-Prep-HPLC with the following conditions (IntelFlash-1): Column, C18 silica gel; mobile phase, CH₃CN/H₂O (0.5% NH₄HCO₃)=1/1 increasing to CH₃CN/H₂O (0.5% NH₄HCO₃)=1/0 within 20 min, the eluted product was collected at CH₃CN/H₂O (0.5% NH₄HCO₃)=1/0; Detector, UV 254 nm. This resulted in to give 4 (9.5 g, 22.0 mmol, 72.3%) as a white solid. ESI-LCMS: m/z 431 [M+H]⁺; ¹H-NMR (400 MHz, DMSO-d₆): δ 11.45 (s, J=1 Hz, 1H, exchanged with D₂O), 7.93 (d, J=8.5 Hz, 1H), 6.02-5.97 (m, 1H), 5.76-5.74 (m, 1H), 5.29-5.14 (m, 1H), 4.59-4.52 (m, 1H), 4.29-4.27 (m, 1H), 1.46 (s, 9H), 0.89 (s, 9H), 0.12 (s, 6H).

[0302] Preparation of (5): To the solution of 4 (8.5 g, 19.7 mmol) in dry THF/MeOD/D₂O=10/2/1 (80 mL) was added NaBD₄ (2.5 g, 59.1 mmol) three times per an hour at 50° C. And the reaction mixture was stirred at r.t for 2 h. After completion of reaction, adjusted pH value to 7 with CH₃COOD, after addition of water, the resulting mixture was extracted with EA (300 mL). The combined organic layer was washed with water and brine, dried over Na₂SO₄, and concentrated to give a residue which was purified by Flash-Prep-HPLC with the following conditions (IntelFlash-1): Column, C18 silica gel; mobile phase, CH₃CN/H₂O (0.5% NH₄HCO₃)=2/3 increasing to CH₃CN/H₂O (0.5% NH₄HCO₃)=3/2 within 20 min, the eluted product was collected at CH₃CN/H₂O (0.5% NH₄HCO₃)=1/1; Detector, UV 254 nm. This resulted in to give 5 (3.5 g, 9.7 mmol, 50.3%) as a white solid. ESI-LCMS: m/z 363 [M+H]⁺; ¹H-NMR (400 MHz, DMSO-d₆): δ 11.41 (s, J=1 Hz, 1H, exchanged with D₂O), 7.88 (d, J=8 Hz, 1H), 5.91-5.86 (m, 1H), 5.66-5.62 (m, 1H), 5.19 (t, J=5.2 Hz, 1H, exchanged with D₂O), 5.18-5.03 (m, 1H), 4.37-4.29 (m, 1H), 3.87-3.83 (m, 1H), 0.88 (s, 9H), 0.10 (s, 6H).

[0303] Preparation of (6): To a stirred solution of 5 (3.4 g, 9.7 mmol) in pyridine (35 mL) were added DMTrCl (3.4 g, 10.1 mmol) at r.t. And the reaction mixture was stirred at r.t for 2.5 h. With ice-bath cooling, the reaction was quenched with water and the product was extracted with EA (200 mL). The organic phase was evaporated to dryness under reduced pressure to give a residue which was purified by Flash-Prep-HPLC with the following conditions (IntelFlash-1): Column, C18 silica gel; mobile phase, CH₃CN/H₂O (0.5% NH₄HCO₃)=1/1 increasing to CH₃CN/H₂O (0.5% NH₄HCO₃)=1/0 within 20 min, the eluted product was collected at CH₃CN/H₂O (0.5% NH₄HCO₃)=1/0; Detector, UV 254 nm. This resulted in to give 6 (PCT Int. Appl., 2019173602), (5.5 g, 8.3 mmol, 85.3%) as a white solid. ESI-LCMS: m/z 665 [M+H]⁺; ¹H-NMR (400 MHz, DMSO-d₆): δ 11.50 (d, J=1 Hz, 1H, exchanged with D₂O), 7.92 (d, J=4 Hz, 1H), 7.44-7.27 (m, 9H), 6.96-6.93 (m, 4H), 5.94 (d, J=20.5 Hz, 1H), 5.39-5.37 (m, 1H), 5.32-5.17 (m, 1H), 4.60-4.51 (m, 1H), 4.01 (d, J=8.8 Hz, 1H), 3.80 (s, 6H), 0.80 (s, 9H), 0.09 (s, 3H), −0.05 (s, 3H).

[0304] Preparation of (7): To a solution of 6 (5.5 g, 8.3 mmol) in THF (50 mL) was added 1 M TBAF solution (9 mL). The reaction mixture was stirred at r.t. for 1.5 h. LC-MS showed 6 was consumed completely. Water (500 mL) was added. The product was extracted with EA (300 mL) and the organic layer was washed with brine and dried over Na₂SO₄. Then the organic layer was concentrated to give a residue which was purified by Flash-Prep-HPLC with the following conditions (IntelFlash-1): Column, C18 silica gel; mobile phase, CH₃CN/H₂O (0.5% NH₄HCO₃)=2/3 increasing to CH₃CN/H₂O (0.5% NH₄HCO₃)=3/2 within 20 min, the eluted product was collected at CH₃CN/H₂O (0.5% NH₄HCO₃)=1/1; Detector, UV 254 nm. This resulted in to give 7 (4.1 g, 7.5 mmol, 90.0%) as a white solid. ESI-LCMS: m/z 551 [M+H]⁺; ¹H-NMR (400 MHz, DMSO-d₆): δ 11.42 (s, 1H, exchanged with D₂O), 7.76 (d, J=8.2 Hz, 1H), 7.39-7.22 (m, 9H), 6.90-6.88 (m, 4H), 5.83 (d, J=20.5 Hz, 1H), 5.65 (d, J=7.0 Hz, 1H, exchanged with D₂O), 5.29 (d, J=7.2 Hz, 1H), 5.18-5.03 (m, 1H), 4.40-4.28 (m, 1H), 4.01 (d, J=8.8 Hz, 1H), 3.74 (s, 6H).

[0305] Preparation of Example 13 monomer: To a suspension of 7 (4.1 g, 7.5 mmol) in DCM (40 mL) was added DCI (0.7 g, 6.4 mmol) and CEP[N(iPr)₂]₂ (2.9 g, 9.7 mmol). The mixture was stirred at r.t. for 1 h. LC-MS showed 7 was consumed completely. The solution was washed with water twice and washed with brine and dried over Na₂SO₄. Then concentrated to give a residue which was purified by Flash-Prep-HPLC with the following conditions (IntelFlash-1): Column, C18 silica gel; mobile phase, CH₃CN/H₂O (0.5% NH₄HCO₃)=1/1 increasing to CH₃CN/H₂O (0.5% NH₄HCO₃)=1/0 within 20 min, the eluted product was collected at CH₃CN/H₂O (0.5% NH₄HCO₃)=1/0; Detector, UV 254 nm. This resulted in to give Example 13 monomer (5.0 g, 6.6 mmol, 90.0%) as a white solid. ESI-LCMS: m/z 751 [M+H]⁺; ¹H-NMR (400 MHz, DMSO-d₆): δ 11.43 (s, 1H), 7.85-7.82 (m, 1H), 7.40-7.23 (m, 9H), 6.90-6.85 (m, 4H), 5.94-5.86 (m, 1H), 5.40-5.24 (m, 2H), 4.74-4.49 (m, 1H), 4.12-4.09 (m, 2H), 3.79-3.47 (m, 1OH), 2.78-2.59 (m, 2H), 1.14-0.93 (m, 12H) ³¹P-NMR (162 MHz, DMSO-d₆): δ 149.67, 149.61, 149.32, 149.27.

### Example 14. Synthesis of Monomer

[chemical structure]

[chemical structure]

[0306] Preparation of (4): To the solution of 3 (14.3 g, 25.4 mmol, Scheme 2) in pyridine (150 mL) was added imidazole (4.5 g, 66.6 mmol) and TBSCl (6.0 g, 40.0 mmol) at 0° C., and the reaction mixture was stirred at room temperature for 15 h under N₂ atmosphere. After addition of water, the resulting mixture was extracted with EA (500 mL). The combined organic layer was washed with water and brine, dried over Na₂SO₄, and concentrated to give the crude 4 (18.0 g) as a white solid which was used directly for next step. ESI-LCMS: m/z 676 [M−H]⁻.

[0307] Preparation of (5): To the solution of crude 4 (18.0 g) in the solution of DCA (6%) in DCM (200 mL) was added TES (50 mL) at r.t, and the reaction mixture was stirred at room temperature for 5-10 min. After completion of reaction, the resulting mixture was added pyridine to pH=7, and then the solvent was removed and the residue was purified by Flash-Prep-HPLC with the following conditions (IntelFlash-1): Column, C18 silica gel; mobile phase, CH₃CN/H₂O (0.5% NH₄HCO₃)=2/3 increasing to CH₃CN/H₂O (0.5% NH₄HCO₃)=3/2 within 20 min, the eluted product was collected at CH₃CN/H₂O (0.5% NH₄HCO₃)=1/1; Detector, UV 254 nm. This resulted in to give 5 (6.5 g, 17.2 mmol, 67.7% for two step) as a white solid. ESI-LCMS: m/z 376 [M+H]⁺; ¹H-NMR (400 MHz, DMSO-d₆): δ 7.92 (d, J=8 Hz, 1H), 5.82 (d, J=5.2 Hz, 1H), 5.68-5.63 (m, 1H), 5.20-5.15 (m, 1H), 4.32-4.25 (m, 1H), 3.87-3.80 (m, 2H), 3.69-3.61 (m, 1H), 3.57-3.49 (m, 1H), 0.88 (s, 9H), 0.09 (s, 6H).

[0308] Preparation of (6): To the solution of 5 (6.5 g, 17.2 mmol) in dry DCM (35 mL) and DMF (9 mL) was added PDC (12.9 g, 34.3 mmol), tert-butyl alcohol (34 mL) and Ac₂O (17 mL) at r.t under N₂ atmosphere. And the reaction mixture was stirred at r.t for 2 hrs. The solvent was removed to give a residue which was purified by silica gel column chromatography (eluent, PE:EA=4:1˜2:1) to give a residue which was purified by Flash-Prep-HPLC with the following conditions (IntelFlash-1): Column, C18 silica gel; mobile phase, CH₃CN/H₂O (0.5% NH₄HCO₃)=1/1 increasing to CH₃CN/H₂O (0.5% NH₄HCO₃)=1/0 within 20 min, the eluted product was collected at CH₃CN/H₂O (0.5% NH₄HCO₃)=1/0; Detector, UV 254 nm. This resulted in to give 6 (5.5 g, 12.3 mmol, 70.1%) as a white solid. ESI-LCMS: m/z 446 [M+H]⁺; ¹H-NMR (400 MHz, DMSO-d₆): δ=11.29 (s, 1H), 7.91 (d, J=8.4 Hz, 1H), 5.85 (d, J=6.4 Hz, 1H), 5.71-5.61 (m, 1H), 4.35-4.28 (m, 1H), 4.12 (d, J=3.2 Hz, 1H), 3.75-3.67 (m, 1H), 1.33 (s, 9H), 0.76 (s, 9H), 0.00 (d, J=1.6 Hz, 6H).

[0309] Preparation of (7): To the solution of 6 (5.4 g, 12.1 mmol) in THF/MeOD/D₂O=10/2/1 (44 mL) was added NaBD₄ (1.5 g, 36.3 mmol) at r.t. and the reaction mixture was stirred at 50° C. for 2 hrs. After completion of reaction, adjusted pH value to 7 with CH₃COOD. Water was added, the resulting mixture was extracted with EA (500 mL). The combined organic layer was washed with water and brine, dried over Na₂SO₄, and concentrated to give a residue which was purified by Flash-Prep-HPLC with the following conditions (IntelFlash-1): Column, C18 silica gel; mobile phase, CH₃CN/H₂O (0.5% NH₄HCO₃)=2/3 increasing to CH₃CN/H₂O (0.5% NH₄HCO₃)=3/2 within 20 min, the eluted product was collected at CH₃CN/H₂O (0.5% NH₄HCO₃)=1/1; Detector, UV 254 nm. This resulted in to give 7 (2.6 g, 6.8 mmol, 56.1%) as a white solid. ESI-LCMS: m/z 378 [M+H]⁺; ¹H-NMR (400 MHz, DMSO-d₆): δ 11.35 (s, 1H), 7.91 (d, J=8.0 Hz, 1H), 5.82 (d, J=5.2 Hz, 1H), 5.69-5.60 (m, 1H), 5.14 (s, 1H), 4.34-4.20 (m, 1H), 3.88-3.76 (m, 2H), 0.87 (s, 9H), 0.08 (s, 6H).

[0310] Preparation of (8): To a stirred solution of 7 (2.6 g, 6.8 mmol) in pyridine (30 mL) were added DMTrCl (3.5 g, 10.3 mmol) at r.t. And the reaction mixture was stirred at r.t. for 2.5 hrs. With ice-bath cooling, the reaction was quenched with water and the product was extracted into EA (200 mL). The organic phase was evaporated to dryness under reduced pressure to give a residue which was purified by Flash-Prep-HPLC with the following conditions (IntelFlash-1): Column, C18 silica gel; mobile phase, CH₃CN/H₂O (0.5% NH₄HCO₃)=1/1 increasing to CH₃CN/H₂O (0.5% NH₄HCO₃)=1/0 within 20 min, the eluted product was collected at CH₃CN/H₂O (0.5% NH₄HCO₃)=1/0; Detector, UV 254 nm. This resulted in to give 8 (4.3 g, 6.3 mmol, 90.1%) as a white solid. ESI-LCMS: m/z 678 [M−H]⁻; ¹H-NMR (400 MHz, DMSO-d₆): δ 11.39 (s, 1H), 7.86 (d, J=8.0 Hz, 1H), 7.42-7.17 (m, 9H), 6.96-6.83 (m, 4H), 5.82-5.69 (m, 2H), 5.29 (d, J=8.4 Hz, 1H), 4.36-4.25 (m, 1H), 3.90 (d, J=7.2 Hz, 1H), 3.86-3.80 (m, 1H), 3.73 (s, 6H), 0.75 (s, 9H), 0.02 (s, 3H), −0.04 (s, 3H).

[0311] Preparation of (9): To a solution of 8 (4.3 g, 6.3 mmol) in THF (45 mL) was added 1 M TBAF solution (6 mL). The reaction mixture was stirred at r.t. for 1.5 hrs. LCMS showed 8 was consumed completely. Water (200 mL) was added. The product was extracted with EA (200 mL) and the organic layer was washed with brine and dried over Na₂SO₄. Then the organic layer was concentrated to give a residue which was purified by Flash-Prep-HPLC with the following conditions (IntelFlash-1): Column, C18 silica gel; mobile phase, CH₃CN/H₂O (0.5% NH₄HCO₃)=2/3 increasing to CH₃CN/H₂O (0.5% NH₄HCO₃)=3/2 within 20 min, the eluted product was collected at CH₃CN/H₂O (0.5% NH₄HCO₃)=1/1; Detector, UV 254 nm. This resulted in to give 8 (3.5 g, 6.1 mmol, 90.1%) as a white solid. ESI-LCMS: m/z 678 [M−H]⁻; ¹H-NMR (400 MHz, DMSO-d₆): δ 11.38 (d, J=2.0 Hz, 1H), 7.23 (d, J=8.0 Hz, 1H), 7.41-7.19 (m, 9H), 6.94-6.85 (m, 4H), 5.81 (d, J=4.0 Hz, 1H), 5.33-5.26 (m, 1H), 5.21 (d, J=7.2 Hz, 1H), 4.06-3.90 (m, 2H), 3.83-3.77 (m, 1H), 3.74 (s, 6H).

[0312] Preparation of Example 14 monomer: To a suspension of 9 (2.1 g, 3.7 mmol) in DCM (20 mL) was added DCI (373 mg, 3.1 mmol) and CEP[N(iPr)₂]₂ (1.3 g, 4.4 mmol). The mixture was stirred at r.t. for 1 h. LC-MS showed 9 was consumed completely. The solution was washed with water twice and washed with brine and dried over Na₂SO₄. Then concentrated to give a residue which was purified by Flash-Prep-HPLC with the following conditions (IntelFlash-1): Column, C18 silica gel; mobile phase, CH₃CN/H₂O (0.5% NH₄HCO₃)=1/1 increasing to CH₃CN/H₂O (0.5% NH₄HCO₃)=1/0 within 20 min, the eluted product was collected at CH₃CN/H₂O (0.5% NH₄HCO₃)=1/0; Detector, UV 254 nm. This resulted in to give Example 14 monomer (2.2 g, 3.5 mmol, 80%) as a white solid. ESI-LCMS: m/z 766 [M+H]⁺; ¹H-NMR (400 MHz, ACN-d₃): δ 9.65-8.86 (m, 1H, exchanged with D₂O), 7.93-7.68 (m, 1H), 7.52-7.19 (m, 9H), 6.94-6.78 (m, 4H), 5.95-5.77 (m, 1H), 5.31-5.17 (m, 1H), 4.61-4.37 (m, 1H), 4.20-4.07 (m, 1H), 4.01-3.51 (m, 1OH), 2.74-2.59 (m, 1H), 2.57-2.43 (m, 1H), 1.27-1.10 (m, 9H), 1.09-0.95 (m, 3H). ³¹P-NMR (162 MHz, ACN-d₃): δ=149.88, 149.55.

### Example 15. Synthesis of Monomer

[chemical structure]

[0313] Preparation of (7): To a solution of 6 (17 g, 25.1 mmol, Scheme 3) in ACN (170 mL) was added DMAP (6.13 g, 50.3 mmol) and TEA (5.1 g, 50.3 mmol, 7.2 mL), Then added TPSCl (11.4 g, 37.7 mmol) at 0° C. under N₂ atmosphere and the mixture was stirred at r.t. for 3 h under N₂ atmosphere. Then con. NH₃·H₂O (27.3 g, 233.7 mmol) was added at r.t. and the mixture was stirred at r.t. for 16 h. The reaction was quenched with water and the product was extracted with EA (200 mL). The organic phase was concentrated to give the crude 7 (17.0 g) as a white solid which was used directly for next step.

[0314] Preparation of (8): To a stirred solution of 7 (17.0 g, 25.1 mmol) in pyridine (170 mL) were added BzCl (4.3 g, 30.1 mmol) 0° C. under N₂ atmosphere. And the reaction mixture was stirred at r.t for 2.5 h. With ice-bath cooling, the reaction was quenched with water and the product was extracted with EA (200 mL). The organic phase was evaporated to dryness under reduced pressure to give a residue which was purified by Flash-Prep-HPLC with the following conditions (IntelFlash-1): Column, C18 silica gel; mobile phase, CH₃CN/H₂O (0.5% NH₄HCO₃)=1/1 increasing to CH₃CN/H₂O (0.5% NH₄HCO₃)=1/0 within 20 min, the eluted product was collected at CH₃CN/H₂O (0.5% NH₄HCO₃)=1/0; Detector, UV 254 nm. This resulted in to give 8 (19.0 g, 24.3 mmol, 95.6% over two step) as a white solid. ESI-LCMS: m/z 780 [M+H]⁺.

[0315] Preparation of (9): To a solution of 8 (19.0 g, 24.3 mmol) in THF (190 mL) was added 1 M TBAF solution (24 mL). The reaction mixture was stirred at r.t. for 1.0 h. LC-MS showed 8 was consumed completely. Water (500 mL) was added. The product was extracted with EA (300 mL) and the organic layer was washed with brine and dried over Na₂SO₄. Then the organic layer was concentrated to give a residue which was purified by Flash-Prep-HPLC with the following conditions (IntelFlash-1): Column, C18 silica gel; mobile phase, CH₃CN/H₂O (0.5% NH₄HCO₃)=2/3 increasing to CH₃CN/H₂O (0.5% NH₄HCO₃)=3/2 within 20 min, the eluted product was collected at CH₃CN/H₂O (0.5% NH₄HCO₃)=1/1; Detector, UV 254 nm. This resulted in to give 9 (15.2 g, 23.1 mmol, 95.5%) as a white solid. ESI-LCMS: m/z 666 [M+H]⁺; ¹H-NMR (400 MHz, DMSO-d₆): δ 11.28 (s, 1H), 8.41 (m, 1H), 8.00-7.99 (m, 2H), 7.63-7.15 (m, 13H), 6.93-6.89 (m, 4H), 5.87 (s, 1H), 5.20 (d, J=7.4 Hz, 1H), 4.30 (m, 1H), 4.02 (m, 1H), 3.75 (s, 7H), 3.53 (s, 3H).

[0316] Preparation of Example 15 monomer: To a suspension of 9 (10.0 g, 15.0 mmol) in DCM (100 mL) was added DCI (1.5 g, 12.7 mmol) and CEP[N(iPr)₂]₂ (5.4 g, 18.0 mmol). The mixture was stirred at r.t. for 1 h. LC-MS showed 9 was consumed completely. The solution was washed with water twice and washed with brine and dried over Na₂SO₄. Then concentrated to give a residue which was purified by Flash-Prep-HPLC with the following conditions (IntelFlash-1): Column, C18 silica gel; mobile phase, CH₃CN/H₂O (0.5% NH₄HCO₃)=1/1 increasing to CH₃CN/H₂O (0.5% NH₄HCO₃)=1/0 within 20 min, the eluted product was collected at CH₃CN/H₂O (0.5% NH₄HCO₃)=1/0; Detector, UV 254 nm. This resulted in to give Example 15 monomer (11.5 g, 13.5 mmol, 90.7%) as a white solid. ESI-LCMS: m/z 866 [M+H]^{m}; ¹H-NMR (400 MHz, DMSO-d₆): δ=11.28 (s, 1H), 8.48-8.41 (m, 1H), 8.00-7.99 (m, 2H), 7.63-7.11 (m, 13H), 6.93-6.89 (m, 4H), 5.92 (m, 1H), 4.55-4.44 (m, 1H), 4.17 (m, 1H), 3.95 (m, 1H), 3.80-3.62 (m, 7H), 3.57-3.46 (m, 5H), 3.32 (s, 1H), 2.78 (m, 1H), 2.62-2.59 (m, 1H), 1.19-0.94 (m, 12H); ³¹P-NMR (162 MHz, DMSO-d₆): δ=149.52, 148.82.

### Example 16. Synthesis of Monomer

[chemical structure]

[0317] Preparation of (5): To the solution of 4 (18.8 g, Scheme 5) in dry ACN (200 mL) was added TPSCl (16.8 g, 65.2 mmol) and TEA (5.6 g, 65.2 mmol) and DMAP (6.8 g, 65.2 mmol), and the reaction mixture was stirred at room temperature for 3.5 hrs under N₂ atmosphere. After addition of water, the resulting mixture was extracted with EA (300 mL). The combined organic layer was washed with water and brine, dried over Na₂SO₄, and concentrated to give the crude 5 (22.0 g) as a white solid which was used directly for next step. ESI-LCMS: m/z 677 [M−H]⁺.

[0318] Preparation of (6): To a solution of 5 (22.0 g) in pyridine (150 mL) was added BzCl (6.8 g, 48.9 mmol) under ice bath. The reaction mixture was stirred at r.t. for 2.5 hrs. LCMS showed 5 was consumed. The mixture was diluted with EA and water was added. The product was extracted with EA. The crude was purified by Flash-Prep-HPLC with the following conditions (IntelFlash-1): Column, C18 silica gel; mobile phase, CH₃CN/H₂O (0.5% NH₄HCO₃)=1/1 increasing to CH₃CN/H₂O (0.5% NH₄HCO₃)=1/0 within 25 min, the eluted product was collected at CH₃CN/H₂O (0.5% NH₄HCO₃)=1/0; Detector, UV 254 nm. This resulted in to give the crude 6 (20.8 g, 26.7 mmol, 82% yield over two steps) as a white solid. ESI-LCMS: m/z 781 [M+H]⁺; ¹H-NMR (400 MHz, DMSO-d₆): δ 11.30 (s, 1H), 8.55 (d, J=8.0 Hz, 1H), 8.00-7.98 (m, 2H), 7.74-7.66 (m, 1H), 7.60-7.50 (m, 2H), 7.47-7.31 (m, 4H), 7.30-7.2 (m, 5H), 7.20-7.1 (m, 1H), 6.91 (d, J=7.4 Hz, 4H), 5.91-5.86 (AB, J=20.0 Hz, 1H), 4.30 (d, J=8.0 Hz, 1H), 3.87-3.78 (s, 1H), 3.78-3.70 (m, 6H), 3.62-3.51 (m, 1H), 3.28-3.2 (m, 1H), 2.15-2.05 (m, 3H), 0.73 (s, 9H), 0.00 (m, 6H).

[0319] Preparation of (7): To a solution of 6 (20.8 g, 26.7 mmol) in THF (210 mL) was added 1 M TBAF solution (32 mL). The reaction mixture was stirred at r.t. for 1.5 hrs. LCMS showed 6 was consumed completely. Water (600 mL) was added. The product was extracted with EA (400 mL) and the organic layer was washed with brine and dried over Na₂SO₄. Then the organic layer was concentrated to give a residue which was purified by Flash-Prep-HPLC with the following conditions (IntelFlash-1): Column, C18 silica gel; mobile phase, CH₃CN/H₂O (0.5% NH₄HCO₃)=2/3 increasing to CH₃CN/H₂O (0.5% NH₄HCO₃)=3/2 within 20 min, the eluted product was collected at CH₃CN/H₂O (0.5% NH₄HCO₃)=1/1; Detector, UV 254 nm. This resulted in to give 7 (12.4 g, 18.6 mmol, 70%) as a white solid. ESI-LCMS: m/z 667 [M+H]⁺; ¹H-NMR (400 MHz, DMSO-d₆): δ 11.03 (m, 1H), 8.51-8.48 (m, 1H), 8.08-7.95 (m, 2H), 7.63-7.54 (m, 1H), 7.52-7.19 (m, 9H), 7.16-7.07 (m, 1H), 6.94-6.89 (m, 3H), 5.95-5.87 (m, 1H), 5.31-5.17 (m, 1H), 4.61-4.37 (m, 1H), 4.20-4.07 (m, 1H), 3.82-3.47 (m, 7H), 2.57-2.42 (m, 2H).

[0320] Preparation of Example 16 monomer: To a suspension of 7 (12.4 g, 18.6 mmol) in DCM (120 mL) was added DCI (1.7 g, 15.8 mmol) and CEP[N(iPr)₂]₂ (7.3 g, 24.2 mmol). The mixture was stirred at r.t. for 2 hrs. LC-MS showed 7 was consumed completely. The solution was washed with water twice and washed with brine and dried over Na₂SO₄. Then concentrated to give a residue which was purified by Flash-Prep-HPLC with the following conditions (IntelFlash-1): Column, C18 silica gel; mobile phase, CH₃CN/H₂O (0.5% NH₄HCO₃)=1/1 increasing to CH₃CN/H₂O (0.5% NH₄HCO₃)=1/0 within 20 min, the eluted product was collected at CH₃CN/H₂O (0.5% NH₄HCO₃)=1/0; Detector, UV 254 nm. This resulted in to give Example 16 monomer (13.6 g, 15.7 mmol, 84.0%) as a white solid. ESI-LCMS: m/z 867 [M+H]⁺; ¹H-NMR (400 MHz, DMSO-d₆): δ 11.03 (m, 1H), 8.51-8.48 (m, 1H), 8.08-7.95 (m, 2H), 7.63-7.54 (m, 1H), 7.52-7.19 (m, 9H), 7.16-7.07 (m, 1H), 6.94-6.89 (m, 3H), 5.95-5.87 (m, 1H), 5.31-5.17 (m, 1H), 4.61-4.37 (m, 1H), 4.20-4.07 (m, 1H), 3.82-3.47 (m, 1OH), 2.74-2.59 (m, 1H), 2.57-2.43 (m, 1H), 1.27-1.10 (m, 9H), 1.09-0.95 (m, 3H). ³¹P-NMR (162 MHz, DMSO-d₆): δ 149.59, 148.85.

### Example 17. Synthesis of Monomer

[chemical structure]

[0321] Preparation of (4): To a solution of 3 (13.1 g, 35.2 mmol, Scheme 3) in pyridine (130 mL) was added MsCl (4.8 g, 42.2 mmol) under −10˜0° C. The reaction mixture was stirred at r.t. for 2.5 h under N₂ atmosphere. TLC (DCM/MeOH=15:1) showed the reaction was consumed. The mixture was diluted with EA and water was added. The product was extracted with EA. The organic layer was washed with brine and dried over Na₂SO₄ and concentrated to give the crude. This resulted in to give the product 4 (14.2 g) which was used directly for the next step. ESI-LCMS: m/z 451 [M+H]⁺; ¹H-NMR (400 MHz, DMSO-d₆) δ 11.43 (m, 1H), 7.67-7.65 (m, 1H), 5.90-5.80 (m, 1H), 5.75-5.64 (m, 1H), 4.52-4.21 (m, 3H), 4.12-3.90 (m, 2H), 3.48-3.21 (m, 6H), 0.95-0.78 (s, 9H), 0.13-0.03 (s, 6H).

[0322] Preparation of (5): To a solution of 4 (14.2 g) in DMSO (200 mL) was added DMTrSH (19.6 g, 63.2 mmol) and tetramethylguanidine (5.1 g, 47.4 mmol) at r.t. The reaction mixture was stirred at r.t. for 3.5 h under N₂ atmosphere. LCMS showed 4 the reaction was consumed. The mixture was diluted with EA and water was added. The product was extracted with EA. The organic layer was washed with brine and dried over Na₂SO₄ and concentrated to give the crude. The crude was purified by silica gel column (SiO2, PE/EA=10:1˜1:1) to give 5 (14.2 g, 20.6 mmol, 58.5% yield over two steps) as a white solid. ESI-LCMS: m/z 689 [M+H]; H-NMR (400 MHz, DMSO-d₆) δ 11.39 (m, 1H), 7.63-7.61 (d, J=8.0 Hz, 1H), 7.45-7.1 (m, 9H), 6.91-6.81 (m, 4H), 5.80-5.70 (m, 2H), 4.01-3.91 (m, 1H), 3.85-3.78 (m, 1H), 3.78-3.65 (m, 6H), 3.60-3.51 (m, 1H), 3.43-3.2 (m, 3H), 2.50-2.32 (m, 2H), 0.95-0.77 (s, 9H), −0.00-0.02 (s, 6H).

[0323] Preparation of (6): To a solution of 5 (14.2 g, 20.6 mmol) in THF (140 mL) was added 1 M TBAF solution (20 mL). The reaction mixture was stirred at r.t. under N₂ atmosphere for 2.5 h. LCMS showed 5 was consumed completely. Water was added. The product was extracted with EA and the organic layer was washed with brine and dried over Na₂SO₄. Then the organic layer was concentrated to give a residue which was purified by Flash-Prep-HPLC with the following conditions (IntelFlash-1): Column, C18 silica gel; mobile phase, CH₃CN/H₂O (0.5% NH₄HCO₃)=2/3 increasing to CH₃CN/H₂O (0.5% NH₄HCO₃)=3/2 within 20 min, the eluted product was collected at CH₃CN/H₂O (0.5% NH₄HCO₃)=1/1; Detector, UV 254 nm. This resulted in to give 6 (10.5 g, 18.2 mmol, 88.5%) as a white solid. ESI-LCMS: m/z 576 [M+H]⁺; ¹H-NMR (400 MHz, DMSO-d₆) δ 11.38 (m, 1H), 7.56-7.54 (d, J=8.0 Hz, 1H), 7.45-7.1 (m, 9H), 6.91-6.81 (m, 4H), 5.80-5.70 (m, 2H), 4.05-4.00 (m, 1H), 3.81-3.79 (m, 1H), 3.74 (m, 2H), 3.78-3.65 (m, 6H), 3.60-3.51 (m, 1H), 3.43-3.2 (m, 3H), 2.40-2.32 (m, 1H).

[0324] Preparation of Example 17 monomer: To a suspension of 9 (10.5 g, 18.2 mmol) in DCM (100 mL) was added DCI (1.7 g, 15.5 mmol) and CEP[N(iPr)₂]₂ (7.2 g, 23.7 mmol). The mixture was stirred at r.t. for 1 h. LC-MS showed 9 was consumed completely. The solution was washed with water twice and washed with brine and dried over Na₂SO₄. Then concentrated to give a residue which was purified by Flash-Prep-HPLC with the following conditions (IntelFlash-1): Column, C18 silica gel; mobile phase, CH₃CN/H₂O (0.5% NH₄HCO₃)=1/1 increasing to CH₃CN/H₂O (0.5% NH₄HCO₃)=1/0 within 20 min, the eluted product was collected at CH₃CN/H₂O (0.5% NH₄HCO₃)=1/0; Detector, UV 254 nm. This resulted in to give Example 17 monomer (12.5 g, 16.1 mmol, 88%) as a white solid. ESI-LCMS: m/z 776 [M+H]⁺; ¹H-NMR (400 MHz, DMSO-d₆) δ 11.41 (m, 1H), 7.64-7.59 (m, 1H), 7.40-7.25 (m, 4H), 7.25-7.10 (m, 5H), 6.89-6.86 (m, 4H), 5.72-5.67 (m, 2H), 4.02-4.00 (m, 2H), 3.76-3.74 (m, 8H), 3.74-3.73 (m, 3H), 3.51-3.49 (d, J=8 Hz, 1H), 3.33-3.29 (m, 1H), 2.77-2.73 (m, 1H), 2.63-2.60 (m, 1H), 2.50-2.47 (m, 1H), 1.12-0.99 (m, 12H). ³¹P-NMR (162 MHz, DMSO-d₆): δ 148.92, 148.84.

### Example 18. Synthesis of Monomer

[chemical structure]

[0325] Preparation of (7): To a solution of 6 (16 g, 24.1 mmol, Scheme 4) in ACN (160 mL) was added DMAP (5.9 g, 48.2 mmol) and TEA (4.8 g, 48.2 mmol), then added TPSCl (10.9 g, 36.1 mmol) at 0° C. under N₂ atmosphere and the mixture was stirred at r.t. for 5 hrs under N₂ atmosphere. Then con. NH₃·H₂O (30 mL) was added at r.t. and the mixture was stirred at r.t. for 16 h. The reaction was quenched with water and the product was extracted with EA (200 mL). The organic phase was concentrated to give the crude 7 (16.0 g) as a white solid which was used directly for next step.

[0326] Preparation of (8): To a stirred solution of 7 (16.0 g, 24.1 mmol) in pyridine (160 mL) were added BzCl (4.1 g, 28.9 mmol) 0° C. under N₂ atmosphere. And the reaction mixture was stirred at r.t. for 2.5 h. With ice-bath cooling, the reaction was quenched with water and the product was extracted with EA (200 mL). The organic phase was evaporated to dryness under reduced pressure to give a residue which was purified by Flash-Prep-HPLC with the following conditions (IntelFlash-1): Column, C18 silica gel; mobile phase, CH₃CN/H₂O (0.5% NH₄HCO₃)=1/1 increasing to CH₃CN/H₂O (0.5% NH₄HCO₃)=1/0 within 20 min, the eluted product was collected at CH₃CN/H₂O (0.5% NH₄HCO₃)=1/0; Detector, UV 254 nm. This resulted in to give 8 (18.0 g, 23.4 mmol, 97.0%) as a white solid. ESI-LCMS: m/z 768 [M+H]⁺; ¹H-NMR (400 MHz, DMSO-d₆): δ 11.31 (s, 1H), 8.47 (d, J=7.2 Hz, 1H), 7.99 (d, J=7.6 Hz, 2H), 7.65-7.16 (m, 13H), 6.92 (d, J=8.8 Hz, 4H), 6.01 (d, J=18.4 Hz, 1H), 5.18-5.04 (dd, 1H), 4.58-4.52 (m, 1H), 4.07 (d, J=9.6 Hz, 1H), 3.75 (s, 6H), 0.73 (s, 9H), 0.05 (s, 3H), −0.06 (s, 3H).

[0327] Preparation of (9): To a solution of 8 (18.0 g, 23.4 mmol) in THF (180 mL) was added 1 M TBAF solution (23 mL). The reaction mixture was stirred at r.t. for 1.5 h. LC-MS showed 8 was consumed completely. Water (500 mL) was added. The product was extracted with EA (300 mL) and the organic layer was washed with brine and dried over Na₂SO₄. Then the organic layer was concentrated to give a residue which was purified by Flash-Prep-HPLC with the following conditions (IntelFlash-1): Column, C18 silica gel; mobile phase, CH₃CN/H₂O (0.5% NH₄HCO₃)=2/3 increasing to CH₃CN/H₂O (0.5% NH₄HCO₃)=3/2 within 20 min, the eluted product was collected at CH₃CN/H₂O (0.5% NH₄HCO₃)=1/1; Detector, UV 254 nm. This resulted in to give 7 (13.7 g, 21.1 mmol, 90.5%) as a white solid. ESI-LCMS: m/z 654.2 [M+H]⁺; ¹H-NMR (400 MHz, DMSO-d₆): δ 11.31 (s, 1H), 8.35 (d, J=7.4 Hz, 1H), 8.01 (m, 2H), 7.65-7.16 (m, 13H), 6.92 (d, J=8.8 Hz, 4H), 5.94 (d, J=18.0 Hz, 1H), 5.71 (d, J=7.0 Hz, 1H), 5.12-4.98 (dd, 1H), 4.51-4.36 (m, 1H), 4.09 (d, J=9.6 Hz, 1H), 3.75 (s, 6H).

[0328] Preparation of Example 18 monomer: To a suspension of 9 (10.6 g, 16.2 mmol) in DCM (100 mL) was added DCI (1.6 g, 13.7 mmol) and CEP[N(iPr)₂]₂ (5.8 g, 19.4 mmol). The mixture was stirred at r.t. for 1 h. LC-MS showed 9 was consumed completely. The solution was washed with water twice and washed with brine and dried over Na₂SO₄. Then concentrated to give a residue which was purified by Flash-Prep-HPLC with the following conditions (IntelFlash-1): Column, C18 silica gel; mobile phase, CH₃CN/H₂O (0.5% NH₄HCO₃)=1/1 increasing to CH₃CN/H₂O (0.5% NH₄HCO₃)=1/0 within 20 min, the eluted product was collected at CH₃CN/H₂O (0.5% NH₄HCO₃)=1/0; Detector, UV 254 nm. This resulted in to give Example 18 monomer (10.5 g, 14.5 mmol, ⁷5.9%) as a white solid. ESI-LCMS: m/z 854.3 [M+H]⁺; ¹H-NMR (400 MHz, DMSO-d₆): δ 11.31 (s, 1H), 8.41-8.37 (m, 1H), 8.01 (d, J=7.7 Hz, 2H), 7.65-7.16 (m, 13H), 6.92-6.88 (m, 4H), 6.06-5.98 (m, 1H), 5.33-5.15 (m, 1H), 4.78-4.58 (m, 1H), 4.23-4.19 (m, 1H), 3.81-3.73 (m, 6H), 3.60-3.50 (m, 3H), 3.32 (s, 1H), 2.76 (t, J=6.0 Hz, 1H), 2.60 (t, J=5.8 Hz, 1H), 1.15-0.94 (m, 12H); ³¹P-NMR (162 MHz, DMSO-d₆): δ 150.23, 150.18, 149.43, 149.38.

### Example 19. Synthesis of Monomer

[chemical structure]

[0329] Preparation of (9): To a solution of 8 (18.8 g, 26.4 mmol, Scheme 5) in ACN (200 mL) was added TPSCl (16.8 g, 55.3 mmol) and DMAP (5.6 g, 55.3 mmol) and TEA (6.8 g, 55.3 mmol). The reaction mixture was stirred at r.t. for 3.5 hrs. LCMS showed the reaction was consumed. The mixture was diluted with con. NH₄OH (28 mL). The mixture was diluted with water and EA. The product was extracted with EA. The organic layer was washed with brine and dried over Na₂SO₄ and concentrated to give the crude 9 (18.5 g) which was used directly for the next step.

[0330] Preparation of (10): To a solution of 9 (18.8 g, 27.69 mmol) in pyridine (200 mL) was added BzCl (5.8 g, 41.5 mmol) under ice bath. The reaction mixture was stirred at r.t. for 2.5 hrs. LCMS showed 9 was consumed. The mixture was diluted with EA and water was added. The product was extracted with EA. The crude was purified by Flash-Prep-HPLC with the following conditions (IntelFlash-1): Column, C18 silica gel; mobile phase, CH₃CN/H₂O (0.5% NH₄HCO₃)=1/1 increasing to CH₃CN/H₂O (0.5% NH₄HCO₃)=1/0 within 25 min, the eluted product was collected at CH₃CN/H₂O (0.5% NH₄HCO₃)=1/0; Detector, UV 254 nm. This resulted in to give 10 (19.8 g, 25.3 mmol, 91% yield) as a white solid. ESI-LCMS: m/z 783 [M−H]⁻; ¹H-NMR (400 MHz, DMSO-d₆): δ 11.29 (d, J=2.0 Hz, 1H), 8.42 (d, J=8.0 Hz, 1H), 8.02-8.00 (m, 2H), 7.64-7.62 (m, 1H), 7.60-7.41 (m, 2H), 7.47.41-7.19 (m, 9H), 6.94-6.85 (m, 4H), 5.81 (d, J=4.0 Hz, 1H), 5.33-5.26 (m, 1H), 5.21 (d, J=7.2 Hz, 1H), 4.06-3.90 (m, 2H), 3.83-3.77 (m, 1H), 3.74 (s, 6H).

[0331] Preparation of (11): To a solution of 10 (18.8 g, 26.4 mmol) in THF (190 mL) was added 1 M TBAF solution (28 mL). The reaction mixture was stirred at r.t. for 1.5 hrs. LCMS showed 10 was consumed completely. Water (200 mL) was added. The product was extracted with EA (200 mL) and the organic layer was washed with brine and dried over Na₂SO₄. Then the organic layer was concentrated to give a residue which was purified by Flash-Prep-HPLC with the following conditions (IntelFlash-1): Column, C18 silica gel; mobile phase, CH₃CN/H₂O (0.5% NH₄HCO₃)=2/3 increasing to CH₃CN/H₂O (0.5% NH₄HCO₃)=3/2 within 20 min, the eluted product was collected at CH₃CN/H₂O (0.5% NH₄HCO₃)=1/1; Detector, UV 254 nm. This resulted in to give 11 (17.1 g, 25.6 mmol, 96%) as a white solid. ESI-LCMS: m/z 669 [M−H]⁻; ¹H-NMR (400 MHz, DMSO-d₆): δ 11.29 (d, J=2.0 Hz, 1H), 8.42 (d, J=8.0 Hz, 1H), 8.02-8.00 (m, 2H), 7.64-7.62 (m, 1H), 7.60-7.41 (m, 2H), 7.47.41-7.19 (m, 9H), 6.94-6.85 (m, 4H), 5.81 (d, J=4.0 Hz, 1H), 5.33-5.26 (m, 1H), 5.21 (d, J=7.2 Hz, 1H), 4.06-3.90 (m, 2H), 3.83-3.77 (m, 1H), 3.74 (s, 6H).

[0332] Preparation of Example 19 monomer: To a suspension of 11 (10.8 g, 16.2 mmol) in DCM (100 mL) was added DCI (1.5 g, 13.7 mmol) and CEP[N(iPr)₂]₂ (5.8 g, 19.3 mmol). The mixture was stirred at r.t. for 2 hrs. LC-MS showed 11 was consumed completely. The solution was washed with water twice and washed with brine and dried over Na₂SO₄. Then concentrated to give a residue which was purified by Flash-Prep-HPLC with the following conditions (IntelFlash-1): Column, C18 silica gel; mobile phase, CH₃CN/H₂O (0.5% NH₄HCO₃)=1/1 increasing to CH₃CN/H₂O (0.5% NH₄HCO₃)=1/0 within 20 min, the eluted product was collected at CH₃CN/H₂O (0.5% NH₄HCO₃)=1/0; Detector, UV 254 nm. This resulted in to give Example 19 monomer (11.3 g, 13 mmol, 80%) as a white solid. ESI-LCMS: m/z 868 [M+H]⁺; ¹H-NMR (400 MHz, DMSO-d₆): δ 11.03 (m, 1H), 8.51-8.48 (m, 1H), 8.08-7.95 (m, 2H), 7.63-7.54 (m, 1H), 7.52-7.19 (m, 9H), 7.16-7.07 (m, 1H), 6.94-6.89 (m, 3H), 5.95-5.87 (m, 1H), 5.31-5.17 (m, 1H), 4.61-4.37 (m, 1H), 4.20-4.07 (m, 1H), 3.82-3.47 (m, 1OH), 2.74-2.59 (m, 1H), 2.57-2.43 (m, 1H), 1.27-1.10 (m, 9H), 1.09-0.95 (m, 3H). ³¹P-NMR (162 MHz, DMSO-d₆): δ 149.52, 148.81.

### Example 20. Synthesis of Monomer

[chemical structure]

[0333] Preparation of (2): To a stirred solution of 1 (100.0 g, 406.5 mmol) in pyridine (1000 mL) were added DMTrCl (151.2 g, 447.1 mmol) at r.t. And the reaction mixture was stirred at r.t. for 2.5 hrs. With ice-bath cooling, the reaction was quenched with water and the product was extracted with EA (3000 mL). The organic phase was evaporated to dryness under reduced pressure to give a residue which was purified by silica gel column chromatography (SiO2, dichloromethane:methanol=100:1) to give 2 (210.0 g, 90%) as a white solid. ESI-LCMS: m/z 548.2 [M+H]⁺; ¹H-NMR (400 MHz, DMSO-d₆): δ 11.43 (d, J=1.8 Hz, 1H), 7.77 (d, J=8.0 Hz, 1H), 7.40-7.21 (m, 9H), 6.92-6.88 (m, 4H), 5.89 (d, J=20.0 Hz, 1H), 5.31-5.29 (m, 1H), 5.19-5.04 (dd, 1H), 4.38-4.31 (m, 1H), 4.02-3.98 (m, 1H), 3.74 (s, 6H), 3.30 (d, J=3.2 Hz, 2H); ¹⁹F-NMR (376 MHz, DMSO-d₆): δ −199.51.

[0334] Preparation of (3): To a stirred solution of 2 (100.0 g, 182.8 mmol) in pyridine (1000 mL) were added MsCl (31.2 g, 274.2 mmol) at 0° C. under N₂ atmosphere. And the reaction mixture was stirred at r.t for 2.5 h. With ice-bath cooling, the reaction was quenched with water and the product was extracted with EA (200 mL). The organic phase was evaporated to dryness under reduced pressure to give the crude (114.0 g) as a white solid which was used directly for next step. To the solution of the crude (114.0 g, 187.8 mmol) in DMF (2000 mL) was added K2CO3 (71.5 g, 548.4 mmol), and the reaction mixture was stirred at 90° C. for 15 h under N₂ atmosphere. After addition of water, the resulting mixture was extracted with EA (500 mL). The combined organic layer was washed with water and brine, dried over Na₂SO₄, and concentrated to give a residue which was purified by silica gel column chromatography (SiO2, dichloromethane:methanol=30:1) to give 3 (100.0 g, 90%) as a white solid. ESI-LCMS: m/z 531.2 [M+H]⁺; ¹H-NMR (400 MHz, DMSO-d₆): δ 7.79 (d, J=8.0 Hz, 1H), 7.40-7.21 (m, 9H), 6.89-6.83 (m, 4H), 6.14 (d, J=5.4 Hz, 1H), 6.02-5.90 (dd, 1H), 5.87 (d, J=20.0 Hz, 1H), 5.45 (m, 1H), 4.61 (m, 1H), 3.73 (d, J=1.9 Hz, 6H), 3.30-3.15 (m, 2H), 1.24-1.16 (m, 1H); ¹⁹F-NMR (376 MHz, DMSO-d₆): δ −204.23.

[0335] Preparation of (4): A solution of 3 (100 g, 187.8 mmol) in THF (1000 mL) was added 6N NaOH (34 mL, 206.5 mmol). The mixture was stirred at r.t. for 6 h. After completion of reaction, the resulting mixture was added H₂O, and then the mixture was extracted with EA, the organic layer was washed with brine, dried over sodium sulfate and removed to give the residue was purified by silica gel column chromatography (SiO2, dichloromethane:methanol=30:1) to give 4 (90.4 g, 90%) as a white solid. ESI-LCMS: m/z 548.2 [M+H]⁺; ¹⁹F-NMR (376 MHz, DMSO-d₆): δ −184.58.

[0336] Preparation of (5): To a stirred solution of 4 (90.4 g, 165.2 mmol) in pyridine (1000 mL) were added MsCl (61.5 g, 495.6 mmol) at 0° C. under N₂ atmosphere. And the reaction mixture was stirred at r.t for 16 hrs. With ice-bath cooling, the reaction was quenched with water and the product was extracted with EA. the organic layer was washed with brine, dried over sodium sulfate and removed to give the residue was purified by silica gel column chromatography (SiO2, PE:EA=1:1) to give 5 (75.0 g, 90%) as a white solid. ESI-LCMS: m/z 626.2 [M+H]⁺; ¹H-NMR (400 MHz, DMSO-d₆): δ 11.51 (d, J=1.6 Hz, 1H), 7.43-7.23 (m, 1OH), 6.92-6.88 (m, 4H), 6.08 (d, J=20.0 Hz, 1H), 5.55-5.39 (m, 2H), 4.59 (m, 1H), 3.74 (s, 6H), 3.48-3.28 (m, 2H), 3.17 (s, 3H); ¹⁹F-NMR (376 MHz, DMSO-d₆): δ −187.72.

[0337] Preparation of (6): To the solution of 5 (75.0 g, 120.4 mmol) in DMF (1500 mL) was added KSAc (71.5 g, 548.4 mmol) at 110° C. under N₂ atmosphere, After the reaction mixture was stirred at 110° C. for 3 h were added KSAc (71.5 g, 548.4 mmol) under N₂ atmosphere. And the reaction mixture was stirred at r.t for 16 h. After addition of water, the resulting mixture was extracted with EA. The combined organic layer was washed with water and brine, dried over Na₂SO₄, and concentrated to give a residue which was purified by silica gel column chromatography (SiO2, PE:EA=1:1) to give 6 (29.0 g, 90%) as a white solid. ESI-LCMS: m/z 605.2 [M+H]⁺; ¹H-NMR (400 MHz, DMSO-d₆): δ 11.45 (d, J=1.9 Hz, 1H), 7.95 (d, J=8.0 Hz, 1H), 7.38-7.21 (m, 9H), 6.92-6.87 (m, 4H), 5.93 (m, 1H), 5.50-5.36 (dd, 1H), 5.25-5.23 (dd, 1H), 4.54-4.42 (m, 1H), 4.17-4.12 (m, 1H), 3.74 (m, 7H), 3.35-3.22 (m, 2H), 2.39 (s, 1H); ¹⁹F-NMR (376 MHz, DMSO-d₆): δ −181.97.

[0338] Preparation of (7): A solution of 6 (22 g, 36.3 mmol) in a mixture solvent of THF/MeOH (1:1, 200 mL) was added 1N NaOMe (70 mL, 72.6 mmol) was stirred at 20° C. for 4 h. After completion of reaction, the resulting mixture was added H₂O, and then the mixture was extracted with EA, the organic layer was washed with brine, dried over sodium sulfate and removed to give the residue was purified by Flash-Prep-HPLC with the following conditions (IntelFlash-1): Column, C18 silica gel; mobile phase, CH₃CN/H₂O (0.5% NH₄HCO₃)=2/3 increasing to CH₃CN/H₂O (0.5% NH₄HCO₃)=3/2 within 25 min, the eluted product was collected at CH₃CN/H₂O (0.5% NH₄HCO₃)=4/3; Detector, UV 254 nm. This resulted in to give 7 (10.5 g, 14.5 mmol, 75.9%) as a white solid. ESI-LCMS: m/z 565.1 [M+H]⁺; ¹H-NMR (400 MHz, DMSO-d₆): δ 11.45 (s, 1H), 7.83 (d, J=8.0 Hz, 1H), 7.40-7.23 (m, 9H), 6.90 (d, J=8.8 Hz, 4H), 5.88 (m, 1H), 5.29-5.15 (m, 2H), 3.72 (m, 7H), 3.43 (m, 2H), 2.78 (d, J=10.6 Hz, 1H).

[0339] Preparation of Example 20 monomer: To a suspension of 7 (10.5 g, 18.6 mmol) in DCM (100 mL) was added DCI (1.8 g, 15.7 mmol) and CEP[N(iPr)₂]₂ (6.7 g, 22.3 mmol). The mixture was stirred at r.t. for 1 h. LC-MS showed 8 was consumed completely. The solution was washed with water twice and washed with brine and dried over Na₂SO₄. Then concentrated to give a residue which was purified by Flash-Prep-HPLC with the following conditions (IntelFlash-1): Column, C18 silica gel; mobile phase, CH₃CN/H₂O (0.5% NH₄HCO₃)=1/1 increasing to CH₃CN/H₂O (0.5% NH₄HCO₃)=1/0 within 20 min, the eluted product was collected at CH₃CN/H₂O (0.5% NH₄HCO₃)=1/0; Detector, UV 254 nm. This resulted in to give Example 20 monomer (10.5 g, 14.5 mmol, 75.9%) as a white solid. ESI-LCMS: m/z 765.3 [M+H]⁺; ¹H-NMR (400 MHz, DMSO-d₆): δ 11.40 (d, J=12.2 Hz, 1H), 7.90-7.86 (m, 1H), 7.41-7.24 (m, 9H), 6.91-6.89 (m, 4H), 5.97 (m, 1H), 5.33-5.10 (m, 2H), 4.18-4.16 (m, 1H), 3.91-3.39 (m, 17H), 2.81 (t, J=5.6 Hz, 1H), 2.66 (t, J=6.0 Hz, 1H), 1.33-0.97 (m, 12H); ³¹P-NMR (162 MHz, DMSO-d₆): δ 164.57, 160.13.

### Example 21. Synthesis of Monomer

[chemical structure]

[0340] Preparation of (2): To a stirred solution of 1 (100.0 g, 387.5 mmol) in pyridine (1000 mL) was added DMTrCl (151.2 g, 447.1 mmol) at r.t. And the reaction mixture was stirred at r.t. for 2.5 hrs. With ice-bath cooling, the reaction was quenched with water and the product was extracted with EA (3000 mL). The organic phase was evaporated to dryness under reduced pressure to give a residue which was purified by silica gel column chromatography (SiO2, dichloromethane:methanol=100:1) to give 2 (200.0 g, 90%) as a white solid. ESI-LCMS: m/z 561 [M+H]⁺.

[0341] Preparation of (3): To a stirred solution of 2 (73.0 g, 130.3 mmol) in pyridine (730 mL) were added MsCl (19.5 g, 169.2 mmol) at 0° C. under N₂ atmosphere. And the reaction mixture was stirred at r.t for 2.5 h. With ice-bath cooling, the reaction was quenched with water and the product was extracted with EA (200 mL). The organic phase was evaporated to dryness under reduced pressure to give the crude (80.0 g) as a white solid which was used directly for next step. To the solution of the crude (80.0 g, 130.3 mmol) in DMF (1600 mL) was added K2CO3 (71.5 g, 390.9 mmol), and the reaction mixture was stirred at 90° C. for 15 h under N₂ atmosphere. After addition of water, the resulting mixture was extracted with EA (500 mL). The combined organic layer was washed with water and brine, dried over Na₂SO₄, and concentrated to give a residue which was purified by silica gel column chromatography (SiO2, dichloromethane:methanol=30:1) to give 3 (55.0 g, 90%) as a white solid. ESI-LCMS: m/z 543. [M+H]⁺; ¹H-NMR (400 MHz, DMSO-d₆): δ 7.68 (d, J=8.0 Hz, 1H), 7.40-7.21 (m, 9H), 6.89-6.83 (m, 4H), 5.96 (s, 1H), 5.83 (d, J=5.4 Hz, 1H), 5.26 (s, 1H), 4.59 (s, 1H), 4.46 (t, J=6.0 Hz, 1H), 3.72 (s, 6H), 3.44 (s, 3H), 3.18-3.12 (m, 2H).

[0342] Preparation of (4): A solution of 3 (55 g, 101.8 mmol) in THF (550 mL) was added 6N NaOH (34 mL, 206.5 mmol). The mixture was stirred at 20° C. for 6 hrs. After completion of reaction, the resulting mixture was added H₂O, and then the mixture was extracted with EA, the organic layer was washed with brine, dried over sodium sulfate and removed to give the residue was purified by silica gel column chromatography (SiO2, dichloromethane:methanol=30:1) to give 4 (57.4 g, 87%) as a white solid. ESI-LCMS: m/z 561 [M+H]⁺.

[0343] Preparation of (5): To a stirred solution of 4 (57.4 g, 101.8 mmol) in pyridine (550 mL) were added MsCl (61.5 g, 495.6 mmol) at 0° C. under N₂ atmosphere. And the reaction mixture was stirred at r.t for 16 h. With ice-bath cooling, the reaction was quenched with water and the product was extracted with EA. the organic layer was washed with brine, dried over sodium sulfate and removed to give the residue was purified by silica gel column chromatography (SiO2, PE:EA=1:1) to give 5 (57.0 g, 90%) as a white solid. ESI-LCMS: m/z 639 [M+H]⁺.

[0344] Preparation of (6): To the solution of 5 (57.0 g, 89.2 mmol) in DMF (600 mL) was added KSAc (71.5 g, 448.4 mmol) at 110° C. under N₂ atmosphere, After the reaction mixture was stirred at 110° C. for 3 h were added KSAc (71.5 g, 448.4 mmol) under N₂ atmosphere. And the reaction mixture was stirred at r.t for 16 h. After addition of water, the resulting mixture was extracted with EA. The combined organic layer was washed with water and brine, dried over Na₂SO₄, and concentrated to give a residue which was purified by silica gel column chromatography (SiO2, PE:EA=1:1) to give 6 (29.0 g, 47%) as a white solid. ESI-LCMS: m/z 619.2 [M+H]⁺; ¹H-NMR (400 MHz, DMSO-d₆): δ 11.41 (s, 1H), 8.06 (s, 1H), 7.40-7.23 (m, 9H), 6.90 (d, J=8.8 Hz, 4H), 5.82 (s, 1H), 5.10-5.08 (dd, 1H), 4.38-4.34 (m, 1H), 4.08-4.02 (m, 3H), 3.74 (s, 6H), 3.45 (s, 3H), 3.25 (m, 2H), 2.37 (s, 3H); ESI-LCMS: m/z 619 [M+H]⁺.

[0345] Preparation of (7): A solution of 6 (22 g, 35.3 mmol) in a mixture solvent of THF/MeOH (1:1, 200 mL) was added 1N NaOMe (70 mL, 72.6 mmol) was stirred at 20° C. for 4 h. After completion of reaction, the resulting mixture was added H₂O, and then the mixture was extracted with EA, the organic layer was washed with brine, dried over sodium sulfate and removed to give the residue was purified by Flash-Prep-HPLC with the following conditions (IntelFlash-1): Column, C18 silica gel; mobile phase, CH₃CN/H₂O (0.5% NH₄HCO₃)=2/3 increasing to CH₃CN/H₂O (0.5% NH₄HCO₃)=3/2 within 25 min, the eluted product was collected at CH₃CN/H₂O (0.5% NH₄HCO₃)=4/3; Detector, UV 254 nm. This resulted in to give 7 (14.0 g, 70.9%) as a white solid. ESI-LCMS: m/z 576.1 [M+H]⁺; ¹H-NMR (400 MHz, DMSO-d₆): δ 11.38 (s, 1H), 7.90 (d, J=8.0 Hz, 1H), 7.40-7.23 (m, 9H), 6.90 (d, J=8.8 Hz, 4H), 5.80 (s, 1H), 5.15-5.13 (dd, 1H), 3.93 (m, 1H), 3.87 (d, J=5.0 Hz, 1H), 3.74 (s, 6H), 3.59 (m, 2H), 3.49 (s, 3H), 3.39 (d, J=2.2 Hz, 2H), 2.40 (d, J=10.2 Hz, 1H).

[0346] Preparation of Example 21 monomer: To a suspension of 7 (10.5 g, 18.6 mmol) in DCM (100 mL) was added DCI (1.8 g, 15.7 mmol) and CEP[N(iPr)₂]₂ (6.7 g, 22.3 mmol). The mixture was stirred at r.t. for 1 h. LC-MS showed 7 was consumed completely. The solution was washed with water twice and washed with brine and dried over Na₂SO₄. Then concentrated to give a residue which was purified by Flash-Prep-HPLC with the following conditions (IntelFlash-1): Column, C18 silica gel; mobile phase, CH₃CN/H₂O (0.5% NH₄HCO₃)=1/1 increasing to CH₃CN/H₂O (0.5% NH₄HCO₃)=1/0 within 20 min, the eluted product was collected at CH₃CN/H₂O (0.5% NH₄HCO₃)=1/0; Detector, UV 254 nm. This resulted in to give Example 21 monomer (10.5 g, 14.5 mmol, 75.9%) as a white solid. ESI-LCMS: m/z 776.3 [M+H]⁺; ¹H-NMR (400 MHz, DMSO-d₆): δ 11.40 (d, J=12.2 Hz, 1H), 8.04-7.96 (dd, 1H), 7.43-7.24 (m, 9H), 6.92-6.87 (m, 4H), 5.84 (m, 1H), 4.93 (m, 1H), 4.13 (m, 1H), 3.91-3.39 (m, 17H), 2.82 (t, J=5.6 Hz, 1H), 2.68 (t, J=6.0 Hz, 1H), 1.22-0.97 (m, 12H); ³¹P-NMR (162 MHz, DMSO-d₆): δ 165.06, 157.59.

### Example 22. Synthesis of 5′ End Cap Monomer

[chemical structure]

[0347] Preparation of (2): To a solution of 1 (11.2 g, 24.7 mmol) in DCM (120 mL), imidazole (4.2 g, 61.9 mmol) and TBSCl (5.6 g, 37.1 mmol) were added at r.t., mixture was stirred at r.t. for 15 hrs, LCMS showed 1 was consumed completely. Mixture was added water (500 mL) and extracted with DCM (50 mL*2). The organic phase was dried over Na₂SO₄ and concentrated to give 2 (16.0 g) as an oil for the next step.

[0348] Preparation of (3): To a solution of 2 (16.0 g, 28.4 mmol) was added 6% DCA in DCM (160 mL) and triethylsilane (40 mL) at r.t. The reaction mixture was stirred at r.t. for 2 hrs. TLC showed 2 was consumed completely. Water (300 mL) was added, mixture was extracted with DCM (50 mL*4), organic phase was dried by Na₂SO₄, concentrated by reduce pressure to give crude which was purified by column chromatography (SiO2, PE/EA=10:1 to 1:1) to give 3 (4.9 g, 65.9% yield) as an oil. ESI-LCMS: m/z 263 [M+H]⁺; ¹H-NMR (400 MHz, DMSO-d₆) δ 4.84-4.50 (m, 1H), 4.3-4.09 (m, 1H), 3.90-3.80 (m, 1H), 3.75-3.67 (m, 1H), 3.65-3.57 (m, 2H), 3.50-3.44 (m, 1H), 3.37-3.28 (m, 4H), 0.95-0.78 (s, 9H), 0.13-0.03 (s, 6H).

[0349] Preparation of (4): To a solution of 3 (3.3 g, 12.6 mmol) in DMSO (33 mL) was added EDCI (7.2 g, 37.7 mmol). The mixture was added pyridine (1.1 g, 13.8 mmol) and TFA (788.6 mg, 6.9 mmol). The reaction mixture was stirred at r.t. for 3 hrs. TLC (PE/EA=4:1) showed 3 was consumed. The mixture was diluted with EA and water was added. The product was extracted with EA. The organic layer was washed with brine and dried over Na₂SO₄ and concentrated to give the crude. This resulted in to give 4 (3.23 g) as an oil for the next step.

[0350] Preparation of (5): To a solution of 4 (3.3 g, 12.6 mmol) in toluene (30 mL) was added POM ester 4a (reference for 4a Journal of Medicinal Chemistry, 2018, 61 (3), 734-744) (7.9 g, 12.6 mmol) and KOH (1.3 g, 22.6 mmol) at r.t. The reaction mixture was stirred at 40° C. for 8 hrs. LCMS showed 4 was consumed. The mixture was diluted with water and EA was added. The product was extracted with EA. The organic layer was washed with brine and dried over Na₂SO₄ and concentrated to give the crude. The crude was purified by Flash-Prep-HPLC with the following conditions (IntelFlash-1): Column, C18 silica gel; mobile phase, CH₃CN/H₂O (0.5% NH₄HCO₃)=1/1 increasing to CH₃CN/H₂O (0.5% NH₄HCO₃)=1/0 within 20 min, the eluted product was collected at CH₃CN/H₂O (0.5% NH₄HCO₃)=91/9 Detector, UV 254 nm. This resulted in to give 5 (5.4 g, 9.5 mmol, 75.9% yield) as an oil. ESI-LCMS: m/z 567.2 [M+H]⁺; ¹H-NMR (400 MHz, CDCl₃) δ 6.89-6.77 (m, 1H), 6.07-5.96 (m, 1H), 5.86-5.55 (m, 4H), 4.85-4.73 (m, 1H), 4.36-4.27 (m, 1H), 4.05-3.96 (m, 1H), 3.95-3.85 (m, 1H), 3.73-3.65 (m, 1H), 3.44-3.35 (m, 3H), 1.30-1.25 (s, 18H), 0.94-0.84 (s, 9H), 0.14-0.05 (s, 6H). ³¹P-NMR (162 MHz, CDCl₃) δ 18.30, 15.11.

[0351] Preparation of (6): To a solution of 5 (5.4 g, 9.5 mmol) in HCOOH (30 mL)/H₂O (30 mL)=1:1 at r.t. The reaction mixture was stirred at r.t. for 15 hrs. LCMS showed the reaction was consumed. The mixture was diluted with con. NH₄OH till pH=7.5. The product was extracted with EA. The organic layer was washed with brine and dried over Na₂SO₄ and concentrated to give the crude. The crude was purified by Flash-Prep-HPLC with the following conditions (IntelFlash-1): Column, C18 silica gel; mobile phase, CH₃CN/H₂O (0.5% HCOOH)=30/70 increasing to CH₃CN/H₂O (0.5% HCOOH)=70/30 within 45 min, the eluted product was collected at CH₃CN/H₂O (0.5% HCOOH)=59/41 Detector, UV 220 nm. This resulted in to give 6 (2.4 g, 5.7 mmol, 59.4% yield) as an oil. ESI-LCMS: m/z 453.2 [M+H]⁺; ¹H-NMR (400 MHz, DMSO-d₆) δ 6.84-6.68 (m, 1H), 6.07-5.90 (m, 1H), 5.64-5.55 (m, 4H), 5.32-5.24 (m, 1H), 4.23-4.15 (m, 1H), 4.00-3.90 (m, 1H), 3.89-3.80 (m, 1H), 3.78-3.69 (m, 2H), 3.37-3.30 (s, 3H), 1.30-1.10 (s, 18H). ³¹P-NMR (162 MHz, DMSO-d₆) δ 18.14.

[0352] Preparation of Example 22 monomer: To a solution of 6 (2.1 g, 4.5 mmol) in DCM (21 mL) were added DCI (452.5 mg, 3.8 mmol) and CEP[N(iPr)₂]₂ (1.8 g, 5.9 mmol) at r.t. The reaction mixture was stirred at r.t. for 15 hrs under N₂ atmosphere. LCMS showed 6 was consumed. The mixture was diluted with water. The product was extracted with DCM (30 mL). The organic layer was washed with brine and dried over Na₂SO₄ and concentrated to give the crude. The crude was purified by Flash-Prep-HPLC with the following conditions (IntelFlash-1): Column, C18 silica gel; mobile phase, CH₃CN/H₂O (0.5% NH₄HCO₃)=1/1 increasing to CH₃CN/H₂O (0.5% NH₄HCO₃)=1/0 within 28 min, the eluted product was collected at CH₃CN/H₂O (0.5% NH₄HCO₃)=80/20 Detector, UV 254 nm. This resulted in to give Example 22 monomer (2.8 g, 4.3 mmol, 95.2% yield) as an oil. ESI-LCMS: m/z 653.2 [M+H]⁺; ¹H-NMR (400 MHz, DMSO-d₆) δ 6.89-6.77 (m, 1H), 6.11-5.96 (m, 1H), 5.65-5.50 (m, 4H), 4.39-4.34 (d, J=20 Hz, 1H), 4.18-3.95 (m, 2H), 3.94-3.48 (s, 6H), 3.40-3.28 (m, 4H), 2.84-2.75 (m, 2H), 1.26-1.98 (s, 30H). ³¹P-NMR (162 MHz, DMSO-d₆) δ 149.018, 148.736, 17.775, 17.508.

### Example 23. Synthesis of 5′ End Cap Monomer

[chemical structure]

[0353] Preparation of (2): To a solution of 1 (ref for 1 Tetrahedron, 2013, 69, 600-606) (10.60 g, 47.32 mmol) in DMF (106 mL), imidazole (11.26 g, 165.59 mmol) and TBSCl (19.88 g, 132.53 mmol) were added. The mixture was stirred at r.t. for 3.5 hrs, LCMS showed 1 was consumed completely. Water was added and extracted with EA, dried over by Na₂SO₄. The filtrate was evaporated under reduced pressure to give 2 (20.80 g, 45.94 mmol, 97.19% yield) for the next step.

[0354] Preparation of (3): To a solution of 2 (20.80 g, 45.94 mmol) in THF (248 mL), was added TFA (124 mL) and H₂O (124 mL) at 0° C., reaction mixture was stirred for 30 min. LCMS showed 2 was consumed completely. Then was extracted with EA, washed with sat. NaCl (aq.), dried over by Na₂SO₄. The filtrate was evaporated under reduced pressure to give the crude product which was purified by Flash-Prep-HPLC with the following conditions (IntelFlash-1): Column, C18 silica gel; mobile phase, CH₃CN/H₂O (0.5% NH₄HCO₃)=1/1 increasing to CH₃CN/H₂O (0.5% NH₄HCO₃)=1/0 within 20 min, the eluted product was collected at CH₃CN/H₂O (0.5% NH₄HCO₃)=1/0; Detector, UV 254 nm. This resulted in to give 3 (10.00 g, 29.59 mmol, 64.31% yield). ¹H-NMR (400 MHz, DMSO-d₆): δ 7.33-7.18 (m, 5H), 4.83-4.80 (m, 1H), 4.61-4.59 (m, 1H), 4.21-4.19 (m, 1H), 3.75-3.74 (m, 1H), 3.23 (m, 3H), 3.13 (m, 3H), 2.41-2.40 (m, 1H), 0.81 (m, 9H), 0.00 (m, 6H).

[0355] Preparation of (4): To a solution of 3 (3.70 g, 10.95 mmol) in DMSO (37 mL) was added EDCI (6.30 g, 32.84 mmol). Then pyridine (0.95 g, 12.05 mmol) and TFA (0.69 g, 6.02 mmol) was added in N₂ atmosphere. The mixture was stirred for 3 hrs at r.t. LCMS showed 3 was consumed completely. Water was poured into and extracted with EA, washed with sat. NaCl (aq.), dried over by Na₂SO₄. The filtrate was evaporated under reduced pressure to give the crude product which was directly used for next step.

[0356] Preparation of (5): To a solution of 4 in toluene (100.00 mL), was added 4a (6.93 g, 10.97 mmol) and KOH (1.11 g, 19.78 mmol). It was stirred for 3.5 hrs at 40° C. in N₂ atmosphere. TLC and LCMS showed 4 was consumed completely. Then was extracted with EA, washed with water and sat. NaCl (aq.), dried over by Na₂SO₄. The filtrate was evaporated under reduced pressure to give the crude product which was purified by Flash-Prep-HPLC with the following conditions (IntelFlash-1): Column, C18 silica gel; mobile phase, CH₃CN/H₂O (0.5% NH₄HCO₃)=1/1 increasing to CH₃CN/H₂O (0.5% NH₄HCO₃)=1/0 within 20 min, the eluted product was collected at CH₃CN/H₂O (0.5% NH₄HCO₃)=1/0; Detector, UV 254 nm. This resulted in to give 5 (4.30 g, 6.70 mmol, 61.17% yield). ¹H-NMR (400 MHz, CDCl₃): δ 7.27-7.26 (m, 4H), 7.17 (m, 1H), 6.94-6.82 (m, 1H), 6.13-6.02 (m, 1H), 5.63-5.56 (m, 4H), 4.90-4.89 (m, 1H), 4.45-4.41 (m, 1H), 3.98-3.95 (m, 1H), 3.39-3.29 (m, 4H), 1.90 (m, 1H), 1.12-0.83 (m, 29H), 0.00 (m, 7H); ³¹P-NMR (162 MHz, CDCl₃): δ 18.021, 14.472.

[0357] Preparation of (6): To a solution of 5 (4.30 g, 6.70 mmol) in THF (43.00 mL) was added HCOOH (100 mL) and H₂O (100 mL). It was stirred overnight at r.t. LCMS showed 5 was consumed completely. NH₄OH was poured into it and was extracted with EA, washed with sat. NaCl (aq.), dried over by Na₂SO₄. The filtrate was evaporated under reduced pressure to give the crude product which was purified by Flash-Prep-HPLC with the following conditions (IntelFlash-1): Column, C18 silica gel; mobile phase, CH₃CN/H₂O (0.5% NH₄HCO₃)=1/1 increasing to CH₃CN/H₂O (0.5% NH₄HCO₃)=1/0 within 20 min, the eluted product was collected at CH₃CN/H₂O (0.5% NH₄HCO₃)=1/0; Detector, UV 254 nm. This resulted in to give 6 (2.10 g, 3.98 mmol, 59.32% yield). ¹H-NMR (400 MHz, CDCl₃): δ 7.40-7.28 (m, 5H), 7.11-7.00 (m, 1H), 6.19-6.14 (m, 1H), 5.71-5.68 (m, 4H), 4.95-4.94 (m, 1H), 4.48-4.47 (m, 1H), 4.05-4.03 (m, 1H), 3.62-3.61 (m, 1H), 3.46 (m, 3H), 3.00-2.99 (m, 1H), 1.22 (m, 18H); ³¹P-NMR (162 MHz, CDCl₃): δ 18.134.

[0358] Preparation of Example 23 monomer: To a solution of 6 (2.10 g, 3.98 mmol) in DCM (21 mL) was added DCI (410 mg, 3.47 mmol). CEP (1.40 g, 4.65 mmol) was added in a N₂ atmosphere. LCMS showed 6 was consumed completely. DCM and H₂O was poured, the organic phase was washed with water and sat. NaCl (aq.), dried over by Na₂SO₄. The filtrate was evaporated under reduced pressure at 40° C. to give the crude product which was purified by Flash-Prep-HPLC with the following conditions (IntelFlash-1): Column, C18 silica gel; mobile phase, CH₃CN/H₂O (0.5% NH₄HCO₃)=1/1 increasing to CH₃CN/H₂O (0.5% NH₄HCO₃)=1/0 within 20 min, the eluted product was collected at CH₃CN/H₂O (0.5% NH₄HCO₃)=1/0; Detector, UV 254 nm. This resulted in to give Example 23 monomer (2.10 g, 2.88 mmol). ¹H-NMR (400 MHz, DMSO-d₆): δ 7.39-7.32 (m, 6H), 6.21-6.11 (m, 1H), 5.64-5.61 (m, 4H), 4.91-4.85 (m, 1H), 4.59 (m, 1H), 4.28-4.25 (m, 1H), 3.84-3.60 (m, 5H), 3.36-3.36 (m, 2H), 2.83-2.79 (m, 2H), 1.18-1.14 (m, 29H); ³¹P-NMR (162 MHz, DMSO-d₆): δ 149.588, 148.920, 17.355, 17.010.

### Example 24. Synthesis of 5′ End Cap Monomer

[chemical structure]

[0359] Preparation of (2): To a solution of 1 (5.90 g, 21.50 mmol) in DMF (60.00 mL), imidazole (4.39 g, 64.51 mmol) and TBSCl (7.63 g, 49.56 mmol) were added. The mixture was stirred at r.t. for 3.5 hrs, LCMS showed 1 was consumed completely. Water was added and extracted with EA, dried over by Na₂SO₄. The filtrate was evaporated under reduced pressure to give 2 (11.00 g, 21.91 mmol, 98.19% yield) for the next step. ESI-LCMS: m/z 225.1 [M+H]⁺.

[0360] Preparation of (3): To a solution of 2 (11.00 g, 21.91 mmol) in THF (55.00 mL) was added TFA (110.00 mL) and H₂O (55.00 mL) at 0° C., reaction mixture was stirred for 30 min. LCMS showed 2 was consumed completely. Then was extracted with EA, washed with sat. NaCl (aq.), dried over by Na₂SO₄. The filtrate was evaporated under reduced pressure to give the crude product which was purified by Flash-Prep-HPLC with the following conditions (IntelFlash-1): Column, C18 silica gel; mobile phase, CH₃CN/H₂O (0.5% NH₄HCO₃)=1/1 increasing to CH₃CN/H₂O (0.5% NH₄HCO₃)=1/0 within 20 min, the eluted product was collected at CH₃CN/H₂O (0.5% NH₄HCO₃)=1/0; Detector, UV 254 nm. This resulted in to give 3 (6.20 g, 16.32 mmol, 72.94% yield). ESI-LCMS: m/z 411.2 [M+H]⁺.

[0361] Preparation of (4): To a solution of 3 (3.50 g, 9.02 mmol) in DMSO (35.00 mL) was added EDCI (5.19 g, 27.06 mmol). Then pyridine (0.78 g, 9.92 mmol) and TFA (0.57 g, 4.96 mmol) was added in N₂ atmosphere. The mixture was stirred for 3 h at r.t. Water was poured into it and was extracted with EA, washed with sat. NaCl (aq.), dried over by Na₂SO₄. The filtrate was evaporated under reduced pressure to give the crude product which was directly used for next step. ESI-LCMS: m/z 406.2 [M+H]⁺.

[0362] Preparation of (5): To a solution of 4 in toluene (100.00 mL) was added 4a (5.73 g, 9.07 mmol) and KOH (916.3 g, 16.33 mmol). It was stirred for 3.5 h at 40° C. in N₂ atmosphere. Then was extracted with EA, washed with water and sat. NaCl (aq.), dried over by Na₂SO₄. The filtrate was evaporated under reduced pressure to give the crude product which was purified by Flash-Prep-HPLC with the following conditions (IntelFlash-1): Column, C18 silica gel; mobile phase, CH₃CN/H₂O (0.5% NH₄HCO₃)=1/1 increasing to CH₃CN/H₂O (0.5% NH₄HCO₃)=1/0 within 20 min, the eluted product was collected at CH₃CN/H₂O (0.5% NH₄HCO₃)=1/0; Detector, UV 254 nm. This resulted in to give 5 (5.02 g, 7.25 mmol, 80.44% yield). ESI-LCMS: m/z 693.2 [M+H]⁺; ³¹P-NMR (162 MHz, DMSO-d₆): δ 17.811

[0363] Preparation of (6): To a solution of 5 (4.59 g, 6.63 mmol) in THF (46.00 mL) was added HCOOH (92.00 mL) and H₂O (92.00 mL). It was stirred overnight at r.t. NH₄OH was poured into it and extracted with EA, washed with sat. NaCl (aq.), dried over by Na₂SO₄. The filtrate was evaporated under reduced pressure to give the crude product which was purified by Flash-Prep-HPLC with the following conditions (IntelFlash-1): Column, C18 silica gel; mobile phase, CH₃CN/H₂O (0.5% NH₄HCO₃)=1/1 increasing to CH₃CN/H₂O (0.5% NH₄HCO₃)=1/0 within 20 min, the eluted product was collected at CH₃CN/H₂O (0.5% NH₄HCO₃)=1/0; Detector, UV 254 nm. This resulted in to give 6 (2.52 g, 4.36 mmol, 65.80% yield).

[0364] Preparation of Example 24 monomer: To a solution of 6 (2.00 g, 3.46 mmol) in DCM (21.00 mL) was added DCI (370.00 mg, 3.11 mmol) and CEP (1.12 g, 4.15 mmol) was added in N₂ atmosphere. DCM and H₂O was poured, the organic phase was washed with water and sat. NaCl (aq.), dried over by Na₂SO₄. The filtrate was evaporated under reduced pressure at 38° C. to give the crude product which was purified by Flash-Prep-HPLC with the following conditions (IntelFlash-1): Column, C18 silica gel; mobile phase, CH₃CN/H₂O (0.5% NH₄HCO₃)=1/1 increasing to CH₃CN/H₂O (0.5% NH₄HCO₃)=1/0 within 20 min, the eluted product was collected at CH₃CN/H₂O (0.5% NH₄HCO₃)=1/0; Detector, UV 254 nm. This resulted in to give Example 24 monomer (2.10 g, 2.70 mmol, 78.07% yield). ¹H-NMR (400 MHz, DMSO-d₆): δ 7.39-7.32 (m, 6H), 6.21-6.11 (m, 1H), 5.64-5.61 (m, 4H), 4.91-4.85 (m, 1H), 4.59 (m, 1H), 4.28-4.25 (m, 1H), 3.84-3.60 (m, 5H), 3.36-3.36 (m, 2H), 2.83-2.79 (m, 2H), 1.18-1.14 (m, 29H). ³¹P-NMR (162 MHz, DMSO-d₆): δ 149.588, 148.920, 17.355, 17.010.

### Example 25. Synthesis of Monomer

[chemical structure]

[0365] Preparation of (2): To a solution of 1 (35.0 g, 53.2 mmol) in DMF (350 mL) was added imidazole (9.0 g, 133.0 mmol) then added TBSCl (12.0 g, 79.8 mmol) at 0° C. The mixture was stirred at r.t. for 14 hrs. TLC showed 1 was consumed completely. Water was added to the reaction. The product was extracted with EA, The organic layer was washed with NaHCO₃ and brine. Then the solution was concentrated under reduced pressure the crude 2 (41.6 g) as a white solid which was used directly for next step. ESI-LCMS: m/z 772 [M+H]⁺.

[0366] Preparation of (3): To a solution of 2 (41.0 g, 53.1 mmol) in 3% DCA (53.1 mmol, 350 mL) and Et₃S¹H (53.1 mmol, 100 mL) at 0° C. The mixture was stirred at 0° C. for 0.5 h. TLC showed 2 was consumed completely. NaHCO₃ was added to the reaction. The product was extracted with EA, The organic layer was washed with NaHCO₃ and brine. Then the solution was concentrated under reduced pressure. The residue silica gel column chromatography (eluent, DCM/MeOH=100:1˜20:1). This resulted in to give 3 (20.0 g, 41.7 mmol, 78.6% over two step) as a white solid. ESI-LCMS: m/z 470 [M+H]⁺; ¹H-NMR (400 MHz, DMSO-d₆): δ 12.12 (s, 1H), 11.67 (s, 1H), 8.28 (s, 1H), 6.12-6.07 (dd, J=15 Hz, 1H), 5.75 (d, J=5 Hz, 1H), 5.48-5.24 (m, 2H), 4.55-4.49 (m, 1H), 3.97 (s, 1H), 3.75-3.55 (m, 2H), 2.79-2.76 (m, 1H), 1.12 (d, J=6 Hz, 6H), 0.88 (s, 9H), 0.11 (d, J=6 Hz, 6H).

[0367] Preparation of (4): To the solution of 3 (20 g, 42.6 mmol) in dry DCM (100 mL) and DMF (60 mL) was added PDC (20. g, 85.1 mmol), tert-butyl alcohol (63.1 g, 851.8 mmol) and Ac₂O (43.4 g, 425.9 mmol) at r.t. under N₂ atmosphere. And the reaction mixture was stirred at r.t. for 2 h. The solvent was removed to give a residue which was purified by silica gel column chromatography (eluent, PE:EA=4:1˜2:1) to give a residue which was purified by Flash-Prep-HPLC with the following conditions (IntelFlash-1): Column, C18 silica gel; mobile phase, CH₃CN/H₂O (0.5% NH₄HCO₃)=1/1 increasing to CH₃CN/H₂O (0.5% NH₄HCO₃)=1/0 within 20 min, the eluted product was collected at CH₃CN/H₂O (0.5% NH₄HCO₃)=1/0; Detector, UV 254 nm. This resulted in to give 4 (16.0 g, 29.0 mmol, 68.2% yield) as a white solid. ESI-LCMS: m/z 540 [M+H]⁺; ¹H-NMR (400 MHz, DMSO-d₆): δ 12.12 (s, 1H), 11.69 (s, 1H), 8.28 (s, 1H), 6.21-6.17 (dd, J=15 Hz, 1H), 5.63-5.55 (m, 1H), 4.75-4.72 (m, 1H), 4.41 (d, J=5 Hz, 1H), 2.79-2.76 (m, 1H), 1.46 (s, 9H), 1.13-1.11 (m, 6H), 0.90 (s, 9H), 0.14 (d, J=2 Hz, 6H).

[0368] Preparation of (5): To the solution of 4 (16.0 g, 29.6 mmol) in dry THF/MeOD/D₂O=10/2/1 (195 mL) was added NaBD₄ (3.4 g, 88.9 mmol) at r.t. and the reaction mixture was stirred at 50° C. for 2 h. After completion of reaction, adjusted pH value to 7 with CH₃COOD, after addition of water, the resulting mixture was extracted with EA (300 mL). The combined organic layer was washed with water and brine, dried over Na₂SO₄, Then the solution was concentrated under reduced pressure the crude 5 (11.8 g) as a white solid which was used directly for next step. ESI-LCMS: m/z 402 [M+H]⁺.

[0369] Preparation of (6): To a solution of 5 (5.0 g, 12.4 mmol) in pyridine (50 mL) was added iBuCl (2.6 g, 24.9 mmol) at 0° C. under N₂ atmosphere. The mixture was stirred at r.t. for 14 h. TLC showed 5 was consumed completely. Then the solution diluted with EA. The organic layer was washed with NaHCO₃ and brine. Then the solution was concentrated under reduced pressure to give the crude. To a solution of the crude in pyridine (50 mL) was added 2N NaOH (MeOH/H₂O=4:1, 15 mL) at 0° C. The mixture was stirred at 0° C. for 10 min. Then the solution diluted with EA. The organic layer was washed with NH₄C1 and brine. Then the solution was concentrated under reduced pressure the residue was purified by Flash-Prep-HPLC with the following conditions (IntelFlash-1): Column, C18 silica gel; mobile phase, CH₃CN/H₂O (0.5% NH₄HCO₃)=1/3 increasing to CH₃CN/H₂O (0.5% NH₄HCO₃)=4/1 within 25 min, the eluted product was collected at CH₃CN/H₂O (0.5% NH₄HCO₃)=3/2; Detector, UV 254 nm. This resulted in to give 6 (6 g, 10.86 mmol, 87.17% yield) as a white solid. ESI-LCMS: m/z 472.2 [M+H]⁺; ¹H-NMR (400 MHz, DMSO-d₆): δ 12.12 (s, 1H), 11.67 (s, 1H), 8.28 (s, 1H), 6.12-6.07 (dd, J=15 Hz, 1H), 5.48-5.24 (m, 2H), 5.22 (s, 1H), 4.55-4.49 (m, 1H), 3.97 (d, J=5 Hz, 1H), 2.79-2.76 (m, 1H), 1.12 (d, J=6 Hz, 6H), 0.88 (s, 9H), 0.11 (d, J=6 Hz, 6H).

[0370] Preparation of (7): To a solution of 6 (3.8 g, 8.1 mmol) in pyridine (40 mL) was added DMTrCl (4.1 g, 12.1 mmol) at 20° C. The mixture was stirred at 20° C. for 1 h. TLC showed 7 was consumed completely. Water was added to the reaction. The product was extracted with EA, The organic layer was washed with NaHCO₃ and brine. Then the solution was concentrated under reduced pressure to give the crude product of 7 (6 g, 7.6 mmol, 94.3% yield) as a yellow solid. ESI-LCMS: m/z 775 [M+H]⁺.

[0371] Preparation of (8): To a solution of 7 (6.0 g, 7.75 mmol) in THF (60 mL) was added TBAF (2.4 g, 9.3 mmol). The mixture was stirred at r.t. for 1 h. TLC showed 7 was consumed completely. Water was added to the reaction. The product was extracted with EA, The organic layer was washed with NaHCO₃ and brine. Then the solution was concentrated under reduced pressure, the residue was purified by Flash-Prep-HPLC with the following conditions (IntelFlash-1): Column, C18 silica gel; mobile phase, CH₃CN/H₂O (0.5% NH₄HCO₃)=1/1 increasing to CH₃CN/H₂O (0.5% NH₄HCO₃)=1/0 within 25 min, the eluted product was collected at CH₃CN/H₂O (0.5% NH₄HCO₃)=4/1; Detector, UV 254 nm. This resulted in to give 8 (4.0 g, 5.9 mmol, 76.6% yield) as a white solid. ESI-LCMS: m/z 660 [M+H]⁺; ¹H-NMR (400 MHz, DMSO-d₆): δ 12.12 (s, 1H), 11.67 (s, 1H), 8.12 (s, 1H), 7.34-7.17 (m, 9H), 6.83-6.78 (m, 4H), 6.23-6.18 (m, 1H), 5.66 (d, J=7 Hz, 1H), 5.48-5.35 (m, 1H), 4.65-4.54 (m, 1H), 3.72 (d, J=2 Hz, 6H), 2.79-2.73 (m, 1H), 1.19-1.06 (m, 6H).

[0372] Preparation of Example 25 monomer: To a solution of 9 (4.0 g, 6.1 mmol) in DCM (40 mL) was added DCI (608 mg, 5.1 mmol) and CEP (2.2 g, 7.3 mmol) under N₂ pro. The mixture was stirred at 20° C. for 0.5 h. TLC showed 9 was consumed completely. The product was extracted with DCM, The organic layer was washed with H₂O and brine. Then the solution was concentrated under reduced pressure and the residue was purified by Flash-Prep-HPLC with the following conditions (IntelFlash-1): Column, C18 silica gel; mobile phase, CH₃CN/H₂O (0.5% NH₄HCO₃)=1/1 increasing to CH₃CN/H₂O (0.5% NH₄HCO₃)=1/0 within 25 min, the eluted product was collected at CH₃CN/H₂O (0.5% NH₄HCO₃)=1/0; Detector, UV 254 nm. This resulted in to give Example 25 monomer (5.1 g, 5.81 mmol, 95.8% yield) as a white solid. ESI-LCMS: m/z 860 [M+H]⁺; ¹H-NMR (400 MHz, DMSO-d₆): δ 12.12 (s, 1H), 11.67 (s, 1H), 8.12 (s, 1H), 7.34-7.17 (m, 9H), 6.83-6.78 (m, 4H), 6.23-6.18 (m, 1H), 5.67-5.54 (m, 1H), 4.70-4.67 (m, 1H), 4.23-4.20 (m, 1H), 3.72 (m, 6H), 3.60-3.48 (m, 3H), 2.79-2.58 (m, 3H), 1.13-0.94 (m, 18H); ³¹P-NMR (162 MHz, DMSO-d₆): δ 150.31, 150.26, 140.62, 149.57.

### Example 26: Synthesis of Monomer

[chemical structure]

[0373] Preparation of (2): To a solution of 1 (35 g, 130.2 mmol) in DMF (350 mL) was added imidazole (26.5 g, 390.0 mmol) then added TBSCl (48.7 g, 325.8 mmol) at 0° C. The mixture was stirred at r.t. for 14 h. TLC showed 1 was consumed completely. Water was added to the reaction. The product was extracted with EA, The organic layer was washed with NaHCO₃ and brine. Then the solution was concentrated under reduced pressure the crude 2 (64.6 g) as a white solid which was used directly for next step. ESI-LCMS: m/z 498 [M+H]⁺.

[0374] Preparation of (3): To a solution of 2 (64.6 g, 130.2 mmol) in THF (300 mL) and added TFA/H₂O (1:1, 300 mL) at 0° C. The mixture was stirred at 0° C. for 2 h. TLC showed 2 was consumed completely. NaHCO₃ was added to the reaction. The product was extracted with EA, The organic layer was washed with NaHCO₃ and brine. Then the solution was concentrated under reduced pressure. The residue was purified by silica gel column chromatography (eluent, DCM:MEOH=100:1˜20:1). This resulted in to give 3 (31.3 g, 81.7 mmol, 62.6% over two step) as a white solid. ESI-LCMS: m/z 384 [M+H]⁺.

[0375] Preparation of (4): To a solution of 3 (31.3 g, 81.7 mmol) in ACN/H₂O (1:1, 350 mL) was added DAIB (78.0 g, 244.0 mmol) and Tempo (3.8 g, 24.4 mmol). The mixture was stirred at 40° C. for 2 h. TLC showed 3 was consumed completely. Then filtered to give 4 (22.5 g, 55.5 mmol, 70.9%) as a white solid. ESI-LCMS: m/z 398 [M+H]⁺.

[0376] Preparation of (5): To a solution of 4 (22.5 g, 55.5 mmol) in MeOH (225 mL) held at −15° C. with an ice/MeOH bath was added SOCl₂ (7.6 mL, 94.5 mmol), dropwise at such a rate that the reaction temp did not exceed 7° C. After the addition was complete, cooling was removed, the reaction was allowed to stir at room temp. The mixture was stirred at r.t. for 14 h. TLC showed 4 was consumed completely. Then the solution was concentrated under reduced pressure to get crude 5 (23.0 g) as a white solid which was used directly for next step. ESI-LCMS: m/z 298 [M+H]⁺.

[0377] Preparation of (6): To a solution of 5 (23 g, 55.5 mmol) in DMF (220 mL) was added imidazole (11.6 g, 165.0 mmol) then added TBSCl (12.3 g, 82.3 mmol) at 0° C. The mixture was stirred at 20° C. for 14 h. TLC showed 1 was consumed completely. Water was added to the reaction. The product was extracted with EA, The organic layer was washed with NaHCO₃ and brine. Then the solution was concentrated under reduced pressure. The residue was purified by silica gel column chromatography (eluent, DCM:MEOH=100:1˜20:1). This resulted in to give 6 (21.3 g, 51.1 mmol, 90% over two step) as a white solid. ESI-LCMS: m/z 412 [M+H]⁺.

[0378] Preparation of (7): To the solution of 6 (21.0 g, 51.0 mmol) in dry THF/MeOD/D₂O=10/2/1 (260.5 mL) was added NaBD₄ (6.4 g, 153.1 mmol) at r.t. and the reaction mixture was stirred at 50° C. for 2 h. After completion of reaction, the resulting mixture was added CH₃COOD to pH=7, after addition of water, the resulting mixture was extracted with EA (300 mL). The combined organic layer was washed with water and brine, dried over Na₂SO₄. Then the solution was concentrated under reduced pressure and the residue was used for next step without further purification. ESI-LCMS: m/z 386 [M+H]⁺.

[0379] Preparation of (8): To a stirred solution of 7 (14.0 g, 35 mmol) in pyridine (50 mL) were added BzCl (17.2 g, 122.5 mmol) at 0° C. under N₂ atmosphere. The mixture was stirred at r.t. for 14 h. TLC showed 7 was consumed completely. Then the solution diluted with EA. The organic layer was washed with NaHCO₃ and brine. Then the solution was concentrated under reduced pressure and the residue was used for next step without further purification. To a solution of the crude in pyridine (300 mL) then added 2M NaOH (MeOH:H₂O=4:1, 60 mL) at 0° C. The mixture was stirred at 0° C. for 10 min. Then the solution diluted with EA. The organic layer was washed with NH₄C1 and brine. Then the solution was concentrated under reduced pressure and the residue was purified by Flash-Prep-HPLC with the following conditions (IntelFlash-1): Column, C18 silica gel; mobile phase, CH₃CN/H₂O (0.5% NH₄HCO₃)=1/3 increasing to CH₃CN/H₂O (0.5% NH₄HCO₃)=4/1 within 25 min, the eluted product was collected at CH₃CN/H₂O (0.5% NH₄HCO₃)=3/2; Detector, UV 254 nm. This resulted in to give 8 (14 g, 28.02 mmol, 69.21% yield) as a white solid. ESI-LCMS: m/z 490 [M+H]⁺; ¹H-NMR (400 MHz, DMSO-d₆): δ 11.24 (s, 1H), 8.76 (s, 1H), 8.71 (m, 1H), 8.04 (d, J=7 Hz, 2H), 7.66-7.10 (m, 5H), 6.40-6.35 (dd, 1H), 5.71-5.56 (m, 1H), 5.16 (s, 1H), 4.79-4.72 (m, 1H), 4.01 (m, 1H), 0.91 (s, 9H), 0.14 (m, 6H).

[0380] Preparation of (9): To a solution of 8 (5.1 g, 10.4 mmol) in pyridine (50 mL) was added DMTrCl (5.3 g, 15.6 mmol). The mixture was stirred at r.t. for 1 h. TLC showed 8 was consumed completely. Water was added to the reaction. The product was extracted with EA, The organic layer was washed with NaHCO₃ and brine. Then the solution was concentrated under reduced pressure and the residue was used for next step without further purification. ESI-LCMS: m/z 792 [M+H]⁺.

[0381] Preparation of (10): To a solution of 9 (7.9 g, 10.0 mmol) in THF (80 mL) was added 1M TBAF in THF (12 mL). The mixture was stirred at r.t. for 1 h. TLC showed 9 was consumed completely. Water was added to the reaction. The product was extracted with EA, The organic layer was washed with NaHCO₃ and brine. Then the solution was concentrated under reduced pressure the residue was purified by Flash-Prep-HPLC with the following conditions (IntelFlash-1): Column, C18 silica gel; mobile phase, CH₃CN/H₂O (0.5% NH₄HCO₃)=1/1 increasing to CH₃CN/H₂O (0.5% NH₄HCO₃)=1/0 within 25 min, the eluted product was collected at CH₃CN/H₂O (0.5% NH₄HCO₃)=4/1; Detector, UV 254 nm. This resulted in to give 10 as a white solid. ESI-LCMS: m/z 678 [M+H]⁺; ¹H-NMR (400 MHz, DMSO-d₆): δ 11.25 (s, 1H), 8.74 (s, 1H), 8.62 (s, 1H), 8.04 (d, J=7 Hz, 2H), 7.66-7.53 (m, 3H), 7.33-7.15 (m, 9H), 6.82-6.78 (m, 4H), 6.43 (d, J=20 Hz, 1H), 5.76-5.60 (m, 1H), 4.88-4.80 (m, 1H), 4.13 (d, J=8 Hz, 1H), 3.71 (m, 6H).

[0382] Preparation of Example 26 monomer: To a solution of 10 (6.2 g, 9.1 mmol) in DCM (60 mL) was added DCI (1.1 g, 9.4 mmol) and CEP (3.3 g, 10.9 mmol) under N₂ pro. The mixture was stirred at 20° C. for 0.5 h. TLC showed 10 was consumed completely. The product was extracted with DCM, The organic layer was washed with H₂O and brine. Then the solution was concentrated under reduced pressure and the residue was purified by Flash-Prep-HPLC with the following conditions (IntelFlash-1): Column, C18 silica gel; mobile phase, CH₃CN/H₂O (0.5% NH₄HCO₃)=1/1 increasing to CH₃CN/H₂O (0.5% NH₄HCO₃)=1/0 within 20 min, the eluted product was collected at CH₃CN/H₂O (0.5% NH₄HCO₃)=1/0; Detector, UV 254 nm. This resulted in to give Example 26 monomer (7.5 g, 8.3 mmol, 90.7%) as a white solid. ESI-LCMS: m/z 878 [M+H]⁺; ¹H-NMR (400 MHz, DMSO-d₆): δ 11.25 (s, 1H), 8.68-8.65 (dd, 2H), 8.04 (m, 2H), 7.66-7.53 (m, 3H), 7.33-7.15 (m, 9H), 6.82-6.78 (m, 4H), 6.53-6.43 (m, 1H), 5.96-5.81 (m, 1H), 5.36-5.15 (m, 1H), 4.21 (m, 1H), 3.86-3.52 (m, 1OH), 2.79-2.61 (m, 2H), 1.21-0.99 (m, 12H); ³¹P-NMR (162 MHz, DMSO-d₆): δ 149.60, 149.56, 149.48.

### Example 27. Synthesis of End Cap Monomer

[chemical structure]

[0383] Preparation of (2): To a solution of 1 (20.0 g, 71.2 mmol) in dry pyridine (200.0 mL) was added TBSCl (26.8 g, 177.9 mmol) and imidazole (15.6 g, 227.8 mmol). The mixture was stirred at r.t. for 15 h. TLC showed 1 was consumed completely. The reaction mixture was concentrated to give residue. The residue was quenched with DCM (300.0 mL). The DCM layer was washed with H₂O (100.0 mL*2) and brine. The DCM layer concentrated to give crude 2 (45.8 g) as a yellow oil. The crude used to next step directly. ESI-LCMS m/z 510.5 [M+H]⁺.

[0384] Preparation of (3): To a mixture solution of 2 (45.8 g) in THF (300.0 mL) was added mixture of H₂O (100.0 mL) and TFA (100.0 mL) at 0° C. over 30 min. Then the reaction mixture was stirred at 0° C. for 4 h. TLC showed the 2 was consumed completely. The reaction mixture pH was adjusted to 7-8 with NH₃·H₂O (100 mL). Then the mixture was extracted with EA (500.0 mL*2). The combined EA layer was washed with brine and concentrated to give crude which was purified by c.c. (PE:EA=5:1˜1:0) to give compound 3 (21.0 g, 53.2 mmol, 74.7% yield over 2 steps) as a white solid. ESI-LCMS m/z 396.2 [M+H]⁺.

[0385] Preparation of (4): To a solution of 3 (21.0 g, 53.2 mmol) in ACN (100.0 mL) and water (100.0 mL) were added (diacetoxyiodo)benzene (51.0 g, 159.5 mmol) and TEMPO (2.5 g, 15.9 mmol), The reaction mixture was stirred at 40° C. for 1 h. TLC showed the 3 was consumed completely. The reaction mixture was cooled down to r.t. and filtered, the filtrate was concentrated to give crude which was purified by crystallization (ACN) to give 4 (14.5 g, 35.4 mmol, 66.2% yield). ESI-LCMS m/z 410.1[M+H]⁺.

[0386] Preparation of (5): To a solution of 4 (14.5 g, 35.4 mmol) in toluene (90.0 mL) and MeOH (60.0 mL) was added trimethylsilyldiazomethane (62.5 mL, 2.0 M, 141.8 mmol) at 0° C., then stirred at r.t. for 2 h. TLC showed the 4 was consumed completely. The solvent was removed under reduce pressure, the residue was purified by crystallization (ACN) to give 5 (10.0 g, 23.6 mmol, 66.6% yield). ESI-LCMS m/z 424.2 [M+H]+

[0387] Preparation of (6): To the solution of 5 (10.0 g, 23.6 mmol) in dry THF/MeOD/D₂O=10/2/1 (100.0 mL) was added NaBD₄ (2.98 g, 70.9 mmol) three times during an hour at 40° C., the reaction mixture was stirred at r.t. for 2.0 h. The resulting mixture was added CH₃COOD change pH=7.5, after addition of water, the resulting mixture was extracted with EA (50.0 mL*3). The combined organic layer was washed with water and brine, dried over Na₂SO₄, concentrated to give a residue which was purified by c.c. (PE/EA=1:1˜1:0). This resulted in to give 6 (6.1 g, 15.4 mmol, 65.3% yield) as a white solid. ESI-LCMS m/z 398.1 [M+H]⁺; ¹H-NMR (400 MHz, DMSO-d₆) δ 8.28 (s, 1H), 8.02 (s, 1H), 7.23 (s, 2H), 5.86 (d, J=6.4 Hz, 1H), 5.26 (s, 1H), 4.42-4.41 (m, 1H), 4.35-4.32 (m, 1H), 3.82 (d, J=2.6 Hz, 1H), 3.14 (s, 3H), 0.78 (s, 9H), 0.00 (d, J=0.9 Hz, 6H).

[0388] Preparation of (7): To a solution of 6 (6.1 g, 15.4 mmol) in pyridine (60.0 mL) was added the benzoyl chloride (6.5 g, 46.2 mmol) drop wise at 5° C. The reaction mixture was stirred at r.t. for 2 h. TLC showed the 6 was consumed completely. The reaction mixture was cooled down to 10° C. and quenched with H₂O (20.0 mL), extracted with EA (200.0 mL*2), combined the EA layer. The organic phase was washed with brine and dried over Na₂SO₄, concentrated to give the crude (12.0 g) which was dissolved in pyridine (60.0 mL), cooled to 0° C., 20.0 mL NaOH (2 M in methanol:H₂O=4:1) was added and stirred for 10 min. The reaction was quenched by saturated solution of ammonium chloride, the aqueous layer was extracted with EA (200.0 mL*2), combined the EA layer, washed with brine and dried over Na₂SO₄, concentrated. The residue was purified by c.c. (PE/EA=10:1˜1:1) to give 7 (7.0 g, 13.9 mmol, 90.2% yield). ESI-LCMS m/z 502.2 [M+H]⁺; ¹H-NMR (400 MHz, DMSO-d₆) δ 11.24 (s, 1H, exchanged with D₂O) 8.77 (s, 2H), 8.04-8.06 (m, 2H), 7.64-7.66 (m, 2H), 7.54-7.58 (m, 2H), 6.14-6.16 (d, J=5.9 Hz, 1H), 5.20-5.23 (m, 1H), 4.58-4.60 (m, 1H), 4.52-4.55 (m, 1H), 3.99-4.01 (m, 1H), 3.34 (s, 4H), 0.93 (s, 9H), 0.14-0.15 (d, J=1.44 Hz, 6H).

[0389] Preparation of (8): To a stirred solution of 7 (5.5 g, 10.9 mmol) in DMSO (55.0 mL) was added EDCI (6.3 g, 32.9 mmol), pyridine (0.9 g, 10.9 mmol) and TFA (0.6 g, 5.5 mmol), the reaction mixture was stirred at r.t. for 15 h. The reaction was quenched with water and extracted with EA (100.0 mL). The organic phase was washed by brine, dried over Na₂SO₄, The organic phase was evaporated to dryness under reduced pressure to give a residue 8 (4.8 g) which was used directly to next step. ESI-LCMS: m/z 517.1 [M+H₂O]⁺.

[0390] Preparation of (9b): A solution of 9a (35.0 g, 150.8 mmol) and NaI (90.5 g, 603.4 mmol) in dry ACN (180.0 mL) was added chloromethyl pivalate (113.6 g, 754.3 mmol) at r.t., the reaction was stirred at 80° C. for 4 h. The reaction was cooled to r.t. and quenched by water, then the mixture was extracted with EA (500.0 mL*3), combined the organic layer was washed with saturated solution of ammonium chloride, followed by with brine and dried over Na₂SO₄. Then the organic layer was concentrated to give a residue which was purified by c.c., this resulted in to give 9b (38.0 g, 60.1 mmol, 39.8% yield) as a white solid. ESI-LCMS m/z 655.2 [M+Na]⁺; ¹H-NMR (400 MHz, CDCl₃): δ 5.74-5.67 (m, 8H), 2.67 (t, J=21.6 Hz, 2H), 1.23 (s, 36H).

[0391] Preparation of (9): 3.8 g 10% Pd/C was washed with dry THF (30.0 mL) three times. Then transferred into a round-bottom flask charged with 9b (38.0 g, 60.1 mmol) and solvent (dry THF:D₂O=5:1, 400.0 mL), the mixture was stirred at 80° C. under 1 L H₂ balloon for 15 h. The reaction was cooled to r.t. and extracted with EA (500.0 mL*3), combined the organic layer was washed with brine and dried over Na₂SO₄. The residue 9 (3.0 g, 3.7 mmol, 38.8% yield) as a white solid was used directly to next step without further purification. ESI-LCMS m/z 657.2 [M+Na]⁺; ¹H-NMR (400 MHz, CDCl₃): δ 5.74-5.67 (m, 8H), 1.23 (s, 36H).

[0392] Preparation of (10): A solution of 8 (4.8 g, 9.6 mmol), 9 (7.3 g, 11.5 mmol) and K2CO3 (4.0 g, 38.8 mmol) in dry THF (60.0 mL) and D₂O (20.0 mL) was stirred at r.t. 18 h. LC-MS showed 8 was consumed completely. The product was extracted with EA (300.0 mL) and the organic layer was washed with brine and dried over Na₂SO₄. Then the organic layer was concentrated to give a residue which was purified by c.c. (PE/EA=5:1˜1:1) and MPLC. This resulted in to give 10 (3.0 g, 3.7 mmol, 38.8% yield) as a white solid. ESI-LCMS m/z 806.4[M+H]⁺; ¹H-NMR (400 MHz, DMSO-d₆): δ 11.25 (s, 1H, exchanged with D₂O) 8.75 (s, 2H), 8.07-8.05 (d, J=8.0 Hz, 2H), 7.67-7.54 (m, 3H), 6.05 (d, J=5.1 Hz, 1H), 5.65-5.58 (m, 4H), 4.80-4.70 (m, 2H), 4.59-4.57 (m, 1H), 3.36 (s, 3H), 1.11 (s, 9H), 1.10 (s, 9H), 0.94 (s, 9H), 0.17-0.16 (m, 6H); ³¹P NMR (162 MHz, DMSO-d₆) δ 17.02.

[0393] Preparation of (11): To a round-bottom flask was added 10 (3.0 g, 3.7 mmol) in a mixture of H₂O (30.0 mL), HCOOH (30.0 mL). The reaction mixture was stirred at 40° C. for 15 hrs. LC-MS showed the 10 was consumed completely. The reaction mixture was adjusted the pH=6-7 with con. NH₃·H₂O (100.0 mL). Then the mixture was extracted with DCM (100.0 mL*3). The combined DCM layer was dried over Na₂SO₄. Filtered and filtrate was concentrated to give crude which was purified by Flash-Prep-HPLC with the following conditions (IntelFlash-1): Column, C18 silica gel; mobile phase, CH₃CN/H₂O (0.5% NH₄HCO₃)=1/2 increasing to CH₃CN/H₂O (0.5% NH₄HCO₃)=1/0 within 20 min, the eluted product was collected at CH₃CN/H₂O (0.5% NH₄HCO₃)=3/2; Detector, UV 254 nm. To give product 11 (1.8 g, 2.6 mmol, 70.3% yield). ESI-LCMS m/z=692.2[M+H]⁺; ¹H-NMR (400 MHz, DMSO-d₆): δ 11.11 (s, 1H, exchanged with D₂O) 8.71-8.75 (d, J=14.4, 2H), 8.04-8.06 (m, 2H), 7.64-7.65 (m, 1H), 7.54-7.58 (m, 2H), 6.20-6.22 (d, J=5.4, 2H), 5.74-5.75 (d, J=5.72, 2H), 5.56-5.64 (m, 4H), 4.64-4.67 (m, 1H), 4.58-4.59 (m, 1H), 4.49-4.52 (m, 1H), 3.37 (s, 3H), 1.09-1.10 (d, J=1.96, 18H); ³¹P NMR (162 MHz, DMSO-d₆) δ 17.46.

[0394] Preparation of Example 27 monomer: To a solution of 11 (1.8 g, 2.6 mmol) in DCM (18.0 mL) was added the DCI (276.0 mg, 2.3 mmol), then CEP[N(ipr)₂]₂ (939.5 mg, 3.1 mmol) was added. The mixture was stirred at r.t. for 1 h. TLC showed 11 consumed completely. The reaction mixture was washed with H₂O (50.0 mL*2) and brine (50.0 mL*2), dried over Na₂SO₄ and concentrated to give crude which was purified by Flash-Prep-HPLC with the following conditions (IntelFlash-1): Column, C18 silica gel; mobile phase, CH₃CN/H₂O (0.5% NH₄HCO₃)=1/1 increasing to CH₃CN/H₂O (0.5% NH₄HCO₃)=1/0 within 20 min, the eluted product was collected at CH₃CN/H₂O (0.5% NH₄HCO₃)=9/1; Detector, UV 254 nm. The product was concentrated to give Example 27 monomer (2.0 g, 2.2 mmol, 86.2% yield) as a white solid. ESI-LCMS m/z 892.3[M+H]⁺; ¹H-NMR (400 MHz, DMSO-d₆): δ 11.27 (s, 1H, exchanged with D₂O) 8.72-8.75 (m, 2H), 8.04-8.06 (m, 2H), 7.54-7.68 (m, 3H), 6.20-6.26 (m, 1H), 5.57-5.64 (m, 4H), 4.70-4.87 (m, 3H), 3.66-3.88 (m, 4H), 3.37-3.41 (m, 3H), 2.82-2.86 (m, 2H), 1.20-1.21 (m, 12H), 1.08-1.09 (m, 18H); ³¹P-NMR (162 MHz, DMSO-d₆): δ 150.03, 149.19, 17.05, 16.81.

### Example 28. Synthesis of 5′ End Cap Monomer

[chemical structure]

[0395] Preparation of (6): To a stirred solution of 5 (8.0 g, 21.3 mmol, Scheme 3) in DMSO (80.0 mL) were added EDCI (12.2 g, 63.9 mmol), pyridine (1.7 g, 21.3 mmol), TFA (1.2 g, 10.6 mmol) at r.t. And the reaction mixture was stirred at r.t. for 1.5 h. The reaction was quenched with water and extracted with EA (200.0 mL). The organic phase was washed by brine, dried over Na₂SO₄, The organic phase was evaporated to dryness under reduced pressure to give a residue 6 which was used directly to next step. ESI-LCMS: m/z 372.3 [M+H]⁺.

[0396] Preparation of (8): To a solution of K2CO3 (5.5 g, 8.3 mmol) in dry THF (60.0 mL) and D₂O (20.0 mL) was added a solution of 6 (8.0 g, 21.5 mmol) in dry THF (10.0 mL). The reaction mixture was stirred at r.t. overnight. LC-MS showed 6 was consumed completely. The product was extracted with EA (300.0 mL) and the organic layer was washed with brine and dried over Na₂SO₄. Then the organic layer was concentrated to give a residue which was purified by Flash-Prep-HPLC with the following conditions (IntelFlash-1): Column, C18 silica gel; mobile phase, CH₃CN/H₂O (0.5% NH₄HCO₃)=2/3 increasing to CH₃CN/H₂O (0.5% NH₄HCO₃)=3/2 within 20 min, the eluted product was collected at CH₃CN/H₂O (0.5% NH₄HCO₃)=1/1; Detector, UV 254 nm. This resulted in to give 8 (5.0 g, 7.3 mmol, 40.0%) as a white solid. ESI-LCMS: m/z 679.3 [M+H]⁺; ¹H-NMR (400 MHz, Chloroform-d): δ 9.91 (s, 1H), 7.29 (d, J=8.1 Hz, 1H), 5.82 (d, J=2.7 Hz, 1H), 5.72 (d, J=8.1 Hz, 1H), 5.65-5.54 (m, 4H), 4.43 (dd, J=7.2, 3.2 Hz, 1H), 3.92 (dd, J=7.2, 5.0 Hz, 1H), 3.65 (dd, J=5.1, 2.7 Hz, 1H), 3.44 (s, 3H), 1.13 (s, 18H), 0.82 (s, 9H), 0.01 (d, J=4.8 Hz, 6H); ³¹P NMR (162 MHz, Chloroform-d): δ 16.40.

[0397] Preparation of (9): To a solution of HCOOH (50.0 mL) and H₂O (50.0 mL) was added 8 (5.0 g, 7.3 mmol). The reaction mixture was stirred at 40° C. overnight. LC-MS showed 8 was consumed completely. A solution of NaHCO₃ (500.0 mL) was added. The product was extracted with EA (300.0 mL) and the organic layer was washed with brine and dried over Na₂SO₄. Then the organic layer was concentrated to give a residue which was purified by Flash-Prep-HPLC with the following conditions (IntelFlash-1): Column, C18 silica gel; mobile phase, CH₃CN/H₂O (0.5% NH₄HCO₃)=2/3 increasing to CH₃CN/H₂O (0.5% NH₄HCO₃)=3/2 within 20 min, the eluted product was collected at CH₃CN/H₂O (0.5% NH₄HCO₃)=1/1; Detector, UV 254 nm. This resulted in to give 9 (3.0 g, 5.4 mmol, 73.2%) as a white solid. ESI-LCMS: m/z 565.2 [M+H]⁺; ¹H-NMR (400 MHz, DMSO-d₆): δ 11.43 (s, 1H), 7.64 (d, J=8.1 Hz, 1H), 5.83 (d, J=4.3 Hz, 1H), 5.69-5.56 (m, 5H), 5.54 (d, J=6.7 Hz, 1H), 4.37 (dd, J=6.1, 2.9 Hz, 1H), 4.12 (q, J=6.1 Hz, 1H), 3.96 (dd, J=5.4, 4.3 Hz, 1H), 3.39 (s, 3H), 1.16 (s, 18H); ³¹P NMR (162 MHz, DMSO-d₆): δ 17.16.

[0398] Preparation of Example 28 monomer: To a suspension of 9 (2.6 g, 4.6 mmol) in DCM (40.0 mL) was added DCI (0.5 g, 5.6 mmol) and CEP[N(iPr)₂]₂ (1.7 g, 5.6 mmol). The mixture was stirred at r.t. for 1.0 h. LC-MS showed 9 was consumed completely. The solution was washed with water twice and washed with brine and dried over Na₂SO₄. Then concentrated to give a residue which was purified by Flash-Prep-HPLC with the following conditions (IntelFlash-1): Column, C18 silica gel; mobile phase, CH₃CN/H₂O (0.5% NH₄HCO₃)=1/1 increasing to CH₃CN/H₂O (0.5% NH₄HCO₃)=1/0 within 20 min, the eluted product was collected at CH₃CN/H₂O (0.5% NH₄HCO₃)=1/0; Detector, UV 254 nm. This resulted in to give Example 28 monomer (3.0 g, 3.9 mmol, ⁸5.2%) as a white solid. ESI-LCMS: m/z 765.3 [M+H]⁺; ¹H-NMR (400 MHz, DMSO-d₆): δ 11.44 (s, 1H), 7.71 (dd, J=8.1, 3.8 Hz, 1H), 5.81 (dd, J=4.4, 2.5 Hz, 1H), 5.74-5.53 (m, 5H), 4.59-4.33 (m, 2H), 4.20-4.14 (m, 1H), 3.88-3.53 (m, 4H), 3.39 (d, J=16.2 Hz, 3H), 2.80 (td, J=5.9, 2.9 Hz, 2H), 1.16 (d, J=1.9 Hz, 30H); ³¹P-NMR (162 MHz, DMSO-d₆): δ 147.68, 149.16, 16.84, 16.55.

### Example 29. Synthesis of Monomer

[chemical structure]

[0399] Preparation of (2): To a solution of 1 (26.7 g*2, 0.1 mol) in DMF (400 mL) was added sodium hydride (4.8 g, 0.1 mol) for 30 min, then was added CD₃I (16 g, 0.1 mol) at 0° C. for 2.5 hr (ref. for selective 2′-O-alkylation reaction conditions, J. Org. Chem. 1991, 56, 5846-5859). The mixture was stirring at r.t. for another 1 h. LCMS showed the reaction was consumed. The mixture was filtered and the clear solution was evaporated to dryness and was evaporated with CH₃OH. The crude was purified by silica gel column (SiO2, DCM/MeOH=50:1˜15:1). This resulted in to give the product 2 (35.5 g, 124.6 mmol, 62% yield) as a solid. ESI-LCMS: m/z 285 [M+H]⁺.

[0400] Preparation of (3): To a solution of 2 (35.5 g, 124.6 mmol) in pyridine (360 mL) was added imidazole (29.7 g, 436.1 mmol) and TBSCl (46.9 g, 311.5 mmol). The mixture was stirred at r.t. over night. LCMS showed 2 was consumed completely. The reaction was quenched with water (500 mL). The product was extracted into ethyl acetate (1 L). The organic layer was washed with brine and dried over anhydrous Na₂SO₄. The crude was purified by silica gel column (SiO2, PE/EA=4:1˜1:1). This resulted in to give the product 3 (20.3 g, 39.6 mmol, 31.8% yield) as a solid. ESI-LCMS: m/z 513 [M+H]⁺; ¹H-NMR (400 MHz, DMSO-d₆): δ 8.32 (m, 1H), 8.13 (m, 1H), 7.31 (m, 2H), 6.02-6.01 (d, J=4.0 Hz, 1H), 4.60-4.58 (m, 1H), 4.49-4.47 (m, 1H), 3.96-3.86 (m, 2H), 3.72-3.68 (m, 1H), 0.91-0.85 (m, 18H), 0.13-0.01 (m, 12H).

[0401] Preparation of (4): To a solution of 3 (20.3 g, 39.6 mmol) in THF (80 mL) was added TFA (20 mL) and water (20 mL) at 0° C. The reaction mixture was stirred at 0° C. for 5 h. LC-MS showed 3 was consumed completely. Con. NH₄OH was added to the mixture at 0° C. to quench the reaction until the pH=7.5. The product was extracted into ethyl acetate (200 mL). The organic layer was washed with brine and dried over anhydrous Na₂SO₄. The solution was then concentrated under reduced pressure and the residue was washed by PE/EA=5:1. This resulted in to give 4 (10.5 g, 26.4 mmol, 66.6% yield) as a white solid. ESI-LCMS: m/z 399 [M+H]⁺; ¹H-NMR (400 MHz, DMSO-d₆): δ 8.41 (m, 1H), 8.14 (m, 1H), 7.37 (m, 2H), 5.99-5.97 (d, J=8.0 Hz, 1H), 5.43 (m, 1H), 4.54-4.44 (m, 2H), 3.97-3.94 (m, 1H), 3.70-3.53 (m, 2H), 0.91 (m, 9H), 0.13-0.12 (m, 6H).

[0402] Preparation of (5): To a solution of 4 (10.5 g, 26.4 mmol) in ACN/H₂O=1:1 (100 mL) was added DAIB (25.4 g, 79.2 mmol) and TEMPO (1.7 g, 7.9 mmol). The reaction mixture was stirred at 40° C. for 2 h. LCMS showed 4 was consumed. The mixture was diluted with EA and water was added. The product was extracted with EA. The organic layer was washed with brine and dried over anhydrous Na₂SO₄. The solution was then concentrated under reduced pressure and the residue was washed by ACN. This resulted in to give 5 (6.3 g, 15.3 mmol, 57.9% yield) as a white solid. ESI-LCMS: m/z 413 [M+H]⁺; ¹H-NMR (400 MHz, DMSO-d₆): δ=8.48 (m, 1H), 8.16 (m, 1H), 7.41 (m, 2H), 6.12-6.10 (d, J=8.0 Hz, 1H), 4.75-4.73 (m, 1H), 4.42-4.36 (m, 2H), 3.17 (m, 6H), 2.07 (m, 2H), 0.93 (m, 9H), 0.17-0.15 (m, 6H).

[0403] Preparation of (6): To a solution of 5 (6.3 g, 15.3 mmol) in toluene (36 mL) and methanol (24 mL) was added (trimethylsilyl)diazomethane (7.0 g, 61.2 mmol) till the yellow color not disappear at r.t. for 2 min. LCMS showed the reaction was consumed. The solvent was removed to give the cured 6 (6.0 g) as a solid which used for the next step. ESI-LCMS: m/z 427 [M+H]⁺; ¹H-NMR (400 MHz, DMSO-d₆): δ 8.45 (m, 1H), 8.15 (m, 1H), 7.35 (m, 2H), 6.12-6.10 (d, J=8.0 Hz, 1H), 4.83-4.81 (m, 1H), 4.50-4.46 (m, 1H), 3.73 (m, 3H), 3.31 (m, 1H), 0.93 (m, 9H), 0.15-0.14 (m, 6H).

[0404] Preparation of (7): To the solution of 6 (6 g) in dry THF/MeOD/D₂O=10/2/1 (78 mL) was added NaBD₄ (2.3 g, 54.8 mmol) at r.t. And the reaction mixture was stirred at r.t for 2.5 hr. After completion of reaction, adjusted pH value to 7 with CH₃COOD, after addition of water, the resulting mixture was extracted with EA (100 mL). The combined organic layer was washed with water and brine, dried over Na₂SO₄, and concentrated to give 7 (5.7 g) which was used for the next step. ESI-LCMS: m/z 401 [M+H]⁺.

[0405] Preparation of (8): To a solution of 7 (5.7 g) in pyridine (60 mL) was added BzCl (10.0 g, 71.3 mmol) under ice bath. The reaction mixture was stirred at r.t. for 2.5 hrs. LCMS showed 7 was consumed. The mixture was diluted with EA and water was added. The product was extracted with EA. The crude was purified by Flash-Prep-HPLC with the following conditions (IntelFlash-1): Column, C18 silica gel; mobile phase, CH₃CN/H₂O (0.5% NH₄HCO₃)=1/1 increasing to CH₃CN/H₂O (0.5% NH₄HCO₃)=1/0 within 25 min, the eluted product was collected at CH₃CN/H₂O (0.5% NH₄HCO₃)=7/3; Detector, UV 254 nm. This resulted in to give the crude 8 (6.2 g, 8.7 mmol, 57% yield, over two steps) as a white solid. ESI-LCMS: m/z 713 [M+H]⁺.

[0406] Preparation of (9): To a solution of 8 (6.2 g, 8.7 mmol) in pyridine (70 mL) and was added 1M NaOH (MeOH/H₂O=4/1) (24 mL). LCMS showed 8 was consumed. The mixture was added saturated NH₄C1 till pH=7.5. The mixture was diluted with water and EA. The organic layer was washed with brine and dried over Na₂SO₄ and concentrated to give the crude. The crude was purified by Flash-Prep-HPLC with the following conditions (IntelFlash-1): Column, C18 silica gel; mobile phase, CH₃CN/H₂O (0.5% NH₄HCO₃)=1/1 increasing to CH₃CN/H₂O (0.5% NH₄HCO₃)=1/0 within 25 min, the eluted product was collected at CH₃CN/H₂O (0.5% NH₄HCO₃)=67/33 Detector, UV 254 nm. This resulted in to give the product 10 (4.3 g, 8.5 mmol, 98% yield) as a white solid. ESI-LCMS: m/z 505 [M+H]⁺; ¹H-NMR (400 MHz, DMSO-d₆): δ 11.23 (m, 1H), 8.77 (m, 2H), 8.06-8.04 (m, 2H), 7.66-7.63 (m, 2H), 7.57-7.53 (m, 3H), 6.16-6.14 (d, J=8.0 Hz, 1H), 5.17 (m, 1H), 4.60-4.52 (m, 2H), 3.34 (m, 1H), 0.93 (m, 9H), 0.14 (m, 6H).

[0407] Preparation of (10): To a stirred solution of 9 (4.3 g, 8.5 mmol) in pyridine (45 mL) were added DMTrCl (3.3 g, 9.8 mmol) at r.t. And the reaction mixture was stirred at r.t for 2.5 hr. With ice-bath cooling, the reaction was quenched with water and the product was extracted into EA. The organic layer was washed with brine and dried over Na₂SO₄ and concentrated to give the crude. The crude was purified by Flash-Prep-HPLC with the following conditions (IntelFlash-1): Column, C18 silica gel; mobile phase, CH₃CN/H₂O (0.5% NH₄HCO₃)=1/1 increasing to CH₃CN/H₂O (0.5% NH₄HCO₃)=1/0 within 25 min, the eluted product was collected at CH₃CN/H₂O (0.5% NH₄HCO₃)=97/3 Detector, UV 254 nm. This resulted in to give the product 10 (6.5 g, 8.1 mmol, 95% yield) as a white solid. ESI-LCMS: m/z 807 [M+H]⁺; ¹H-NMR (400 MHz, DMSO-d₆): δ 11.23 (m, 1H), 8.70-8.68 (m, 2H), 8.04-8.02 (m, 2H), 7.66-7.62 (m, 1H), 7.56-7.52 (m, 2H), 7.35-7.26 (m, 2H), 7.25-7.17 (m, 7H), 6.85-6.82 (m, 4H), 6.18-6.16 (d, J=8.0 Hz, 1H), 4.73-4.70 (m, 1H), 4.61-4.58 (m, 1H), 3.71 (m, 6H), 3.32 (m, 1H), 0.83 (m, 9H), 0.09-0.03 (m, 6H).

[0408] Preparation of (11): To a solution of 10 (3.5 g, 4.3 mmol) in THF (35 mL) was added 1 M TBAF solution (5 mL). The reaction mixture was stirred at r.t. for 1.5 h. LCMS showed 10 was consumed completely. Water (100 mL) was added. The product was extracted with EA (100 mL) and the organic layer was washed with brine and dried over Na₂SO₄. Then the organic layer was concentrated to give a residue which was purified by Flash-Prep-HPLC with the following conditions (IntelFlash-1): Column, C18 silica gel; mobile phase, CH₃CN/H₂O (0.5% NH₄HCO₃)=2/3 increasing to CH₃CN/H₂O (0.5% NH₄HCO₃)=1/0 within 20 min, the eluted product was collected at CH₃CN/H₂O (0.5% NH₄HCO₃)=62/38; Detector, UV 254 nm. This resulted in to give 11 (2.7 g, 3.9 mmol, 90.7%) as a white solid. ESI-LCMS: m/z 693 [M+H]⁺.

[0409] Preparation of Example 29 monomer: To a suspension of 11 (2.7 g, 3.9 mmol) in DCM (30 mL) was added DCI (0.39 g, 3.3 mmol) and CEP[N(iPr)₂]₂ (1.4 g, 4.7 mmol). The mixture was stirred at r.t. for 2 h. LC-MS showed 11 was consumed completely. The solution was washed with water twice and washed with brine and dried over Na₂SO₄. Then concentrated to give a residue which was purified by Flash-Prep-HPLC with the following conditions (IntelFlash-1): Column, C18 silica gel; mobile phase, CH₃CN/H₂O (0.5% NH₄HCO₃)=1/1 increasing to CH₃CN/H₂O (0.5% NH₄HCO₃)=1/0 within 20 min, the eluted product was collected at CH₃CN/H₂O (0.5% NH₄HCO₃)=73/27; Detector, UV 254 nm. This resulted in to give Example 29 monomer (3.3 g, 3.7 mmol, 94.9%) as a white solid. ESI-LCMS: m/z 893 [M+H]⁺; ¹H-NMR (400 MHz, DMSO-d₆): δ=11.24 (m, 1H), 8.66-8.64 (m, 2H), 8.06-8.03 (m, 2H), 7.65-7.53 (m, 3H), 7.42-7.38 (m, 2H), 7.37-7.34 (m, 2H), 7.25-7.19 (m, 7H), 6.86-6.80 (m, 4H), 6.20-6.19 (d, J=4.0 Hz, 1H), 4.78 (m, 2H), 4.22-4.21 (m, 1H), 3.92-3.83 (m, 1H), 3.72 (m, 6H), 3.62-3.57 (m, 3H), 2.81-2.78 (m, 1H), 2.64-2.61 (m, 1H), 1.17-1.04 (m, 12H); ³¹P-NMR (162 MHz, DMSO-d₆): δ 149.51, 149.30.

### Example 30. Synthesis of Monomer

[chemical structure]

[0410] Preparation of (3): To the solution of 1 (70 g, 138.9 mmol) in dry acetonitrile (700 mL) was added 2 (27.0 g, 166.7 mmol), BSA (112.8 g, 555.5 mmol). The mixture was stirred at 50° C. for 1 h. Then the mixture was cooled to −5° C. and TMSOTf (46.2 g, 208.3 mmol) slowly added to the mixture. Then the reaction mixture was stirred at r.t for 48 h. Then the solution was cooled to 0° C. and saturated aq·NaHCO₃ was added and the resulting mixture was extracted with EA. The combined organic layer was washed with water and brine, dried over Na₂SO₄, and concentrated under reduced pressure to give a residue which was purified by silica gel column chromatography (eluent, PE:EA=3:1˜1:1) to give 3 (70 g, 115.3 mmol, 81.6%) as a white solid. ESI-LCMS: m/z 605 [M−H]⁺.

[0411] Preparation of (4): To the solution of 3 (70.0 g, 115.3 mmol) in methylammonium solution (1 M, 700 mL), and the reaction mixture was stirred at 40° C. for 15 h. After completion of reaction, the resulting mixture was concentrated. The residue was crystallized from EA. Solid was isolated by filtration, washed with PE and dried overnight at 45° C. in vacuum to give 4 (31.0 g, 105.4 mmol, 91.1%) as a white solid. ESI-LCMS: m/z 295 [M+H]⁺; ¹H-NMR (400 MHz, DMSO): δ 11.63 (s, 1H), 8.07-7.99 (m, 1H), 7.81 (d, J=8.4 Hz, 1H), 7.72-7.63 (m, 1H), 7.34-7.26 (m, 1H), 6.18 (d, J=6.4 Hz, 1H), 5.24 (s, 1H), 5.00 (s, 2H), 4.58-4.47 (m, 1H), 4.19-4.10 (m, 1H), 3.85-3.77 (m, 1H), 3.75-3.66 (m, 1H), 3.66-3.57 (m, 1H).

[0412] Preparation of (5): To the solution of 4 (20.0 g, 68.0 mmol) in dry DMF (200 mL) was added DPC (18.9 g, 88.0 mmol) and NaHCO₃ (343 mg, 4 mmol) at r.t, and the reaction mixture was stirred at 150° C. for 35 min. After completion of reaction, the resulting mixture was poured into tert-Butyl methyl ether (4 L). Solid was isolated by filtration, washed with PE and dried □ in vacuum to give crude 5 (21.0 g) as a brown solid which was used directly for next step (ref for 5, Journal of Organic Chemistry, 1989, vol. 33, p. 1219-1225). ESI-LCMS: m/z 275 [M−H].

[0413] Preparation of (6): To the solution of 5 (crude, 21.0 g) in Pyridine (200 mL) was added AgNO₃ (31.0 g, 180.0 mmol) and collidine (88.0 g, 720 mmol) and TrtCl (41.5 g, 181 mmol) at r.t, and the reaction mixture was stirred at r.t for 15 h. After addition of water, the resulting mixture was extracted with EA. The combined organic layer was washed with water and brine, dried over Na₂SO₄, and concentrated to give the crude. The crude was by Flash-Prep-HPLC with the following conditions (IntelFlash-1): Column, C18 silica gel; mobile phase, CH₃CN/H₂O (0.5% NH₄HCO₃)=1/1 increasing to CH₃CN/H₂O (0.5% NH₄HCO₃)=1/0 within 20 min, the eluted product was collected at CH₃CN/H₂O (0.5% NH₄HCO₃)=1/0; Detector, UV 254 nm. This resulted in to give 6 (10.0 g, 13.1 mmol, 20% yield over 3 steps) as a white solid. ESI-LCMS: m/z 761 [M+H]⁺.

[0414] Preparation of (7): To the solution of 6 (10.0 g, 13.1 mmol) in THF (100 mL) was added 6N NaOH (30 mL) at r.t, and the reaction mixture was stirred at r.t for 1 hr. After addition of NH₄Cl, the resulting mixture was extracted with EA. The combined organic layer was washed with water and brine, dried over Na₂SO₄, and concentrated under reduced pressure and the residue was purified by Flash-Prep-HPLC with the following conditions (IntelFlash-1): Column, C18 silica gel; mobile phase, CH₃CN/H₂O (0.5% NH₄HCO₃)=1/1 increasing to CH₃CN/H₂O (0.5% NH₄HCO₃)=1/0 within 20 min, the eluted product was collected at CH₃CN/H₂O (0.5% NH₄HCO₃)=9/1; Detector, UV 254 nm. This resulted in to give 7 (9.3 g, 11.9 mmol, 90%) as a white solid. ESI-LCMS: m/z 777 [M−H]⁻; ¹H-NMR (400 MHz, DMSO-d₆): δ 11.57 (s, 1H), 8.02 (d, J=8.7 Hz, 1H), 7.88-7.81 (m, 1H), 7.39-7.18 (m, 30H), 7.09-6.99 (m, 30H), 6.92-6.84 (m, 30H), 6.44 (d, J=4.0 Hz, 1H), 4.87 (d, J=4.0 Hz, 1H), 4.37-4.29 (m, 1H), 4.00-3.96 (m, 1H), 3.76-3.70 (m, 1H), 3.22-3.13 (m, 1H), 3.13-3.04 (m, 1H).

[0415] Preparation of (8): To the solution of 7 (8.3 g, 10.7 mmol) in dry DCM (80 mL) was added Pyridine (5.0 g, 64.2 mmol) and DAST (6.9 g, 42.8 mmol) at 0° C., and the reaction mixture was stirred at r.t for 15 hr. After addition of NH₄Cl, the resulting mixture was extracted with DCM. The combined organic layer was washed with water and brine, dried over Na₂SO₄, and concentrated under reduced pressure and the residue was purified by Flash-Prep-HPLC with the following conditions (IntelFlash-1): Column, C18 silica gel; mobile phase, CH₃CN/H₂O (0.5% NH₄HCO₃)=1/1 increasing to CH₃CN/H₂O (0.5% NH₄HCO₃)=1/0 within 20 min, the eluted product was collected at CH₃CN/H₂O (0.5% NH₄HCO₃)=1/0; Detector, UV 254 nm. This resulted in to give 8 (6.8 g, 8.7 mmol, 81.2%) as a white solid. ESI-LCMS: m/z 779 [M−H]⁺; ¹⁹F-NMR (376 MHz, DMSO-d₆): δ −183.05.

[0416] Preparation of (9): To the solution of 8 (5.8 g, 7.5 mmol) in dry ACN (60 mL) was added TEA (1.5 g, 15.1 mmol), DMAP (1.84 g, 15.1 mmol) and TPSCl (4.1 g, 13.6 mmol) at r.t, and the reaction mixture was stirred at room temperature for 3 h under N₂ atmosphere. After completion of reaction, the mixture was added NH₃·H₂O (12 mL). After addition of water, the resulting mixture was extracted with EA. The combined organic layer was washed with water and brine, dried over Na₂SO₄, and concentrated under reduced pressure and the residue was purified by Flash-Prep-HPLC with the following conditions (IntelFlash-1): Column, C18 silica gel; mobile phase, CH₃CN/H₂O (0.5% NH₄HCO₃)=1/1 increasing to CH₃CN/H₂O (0.5% NH₄HCO₃)=1/0 within 20 min, the eluted product was collected at CH₃CN/H₂O (0.5% NH₄HCO₃)=1/0; Detector, UV 254 nm. This resulted in to give 9 (5.5 g, 7 mmol, 90.2%) as a white solid. ESI-LCMS: m/z 780 [M+H]⁺.

[0417] Preparation of (10): To a solution of 9 (5.5 g, 7 mmol) in DCM (50 mL) with an inert atmosphere of nitrogen was added pyridine (5.6 g, 70.0 mmol) and BzCl (1.2 g, 8.5 mmol) in order at 0° C. The reaction solution was stirred for 30 minutes at room temperature. The solution was diluted with DCM (100 mL) and the combined organic layer was washed with water and brine, dried over Na₂SO₄, and concentrated under reduced pressure to give a residue which was purified by silica gel column chromatography (eluent, PE:EA=5:1˜2:1) to give 10 (5.4 g, 6.1 mmol, 90.6%) as a white solid. ESI-LCMS: m/z 884 [M+H]⁺; ¹⁹F-NMR (376 MHz, DMSO-d₆): δ −183.64.

[0418] Preparation of (11): To the solution of 10 (5.4 g, 6.1 mmol) in the solution of DCA (6%) in DCM (60 mL) was added TES (15 mL) at r.t, and the reaction mixture was stirred at room temperature for 5-10 min. After completion of reaction, the resulting mixture was added NaHCO₃, the resulting mixture was extracted with DCM. The combined organic layer was washed with water and brine, dried over Na₂SO₄, and concentrated under reduced pressure and the residue was crystallized from EA. Solid was isolated by filtration, washed with PE and dried overnight at 45° Qin vacuum to give 11 (2.0 g, 5.0 mmol, 83.2%) as a white solid. ESI-LCMS: m/z 400 [M+H]⁺.

[0419] Preparation of (12): To a solution of 11 (2.0 g, 5.0 mmol) in dry Pyridine (20 mL) was added DMTrCl (2.0 g, 6.0 mmol). The reaction mixture was stirred at r.t. for 2.5 h. LCMS showed 11 was consumed and water (200 mL) was added. The product was extracted with EA (200 mL) and the organic layer was washed with brine and dried over Na₂SO₄ and concentrated to give the crude. The crude was purified by c.c. (PE:EA=4:1˜1:1) to give crude 12. The crude was further purified by Flash-Prep-HPLC with the following conditions (IntelFlash-1): Column, C18 silica gel; mobile phase, CH₃CN/H₂O (0.5% NH₄HCO₃)=1/1 increasing to CH₃CN/H₂O (0.5% NH₄HCO₃)=1/0 within 20 min, the eluted product was collected at CH₃CN/H₂O (0.5% NH₄HCO₃)=1/0; Detector, UV 254 nm. This resulted in to give 12 (2.1 g, 3 mmol, 60%) as a white solid. ESI-LCMS: m/z 702 [M+H]⁺; ¹H-NMR (400 MHz, DMSO-d₆): δ 12.63 (s, 1H), 8.54 (d, J=7.8 Hz, 1H), 8.25 (d, J=7.2 Hz, 2H), 7.82 (d, J=3.6 Hz, 2H), 7.67-7.58 (m, 1H), 7.57-7.49 (m, 2H), 7.49-7.39 (m, 1H), 7.39-7.31 (m, 2H), 7.27-7.09 (m, 7H), 6.82-6.69 (m, 4H), 6.23 (d, J=26.1 Hz, 1H), 5.59-5.49 (m, 1H), 4.83-4.61 (m, 1H), 4.15-4.01 (m, 1H), 3.74-3.59 (m, 6H), 3.33-3.28 (m, 1H), 3.16-3.05 (m, 1H). ¹⁹F-NMR (376 MHz, DMSO-d₆): δ −191.66.

[0420] Preparation of Example 30 monomer: To a suspension of 12 (2.1 g, 3.0 mmol) in DCM (20 mL) was added DCI (310 mg, 2.6 mmol) and CEP[N(iPr)₂]₂ (1.1 g, 3.7 mmol). The mixture was stirred at r.t. for 1 h. LC-MS showed 12 was consumed completely. The solution was washed with water twice and washed with brine and dried over Na₂SO₄. Then concentrated to give the crude. The crude was by Flash-Prep-HPLC with the following conditions (IntelFlash-1): Column, C18 silica gel; mobile phase, CH₃CN/H₂O (0.5% NH₄HCO₃)=1/1 increasing to CH₃CN/H₂O (0.5% NH₄HCO₃)=1/0 within 20 min, the eluted product was collected at CH₃CN/H₂O (0.5% NH₄HCO₃)=1/0; Detector, UV 254 nm. This resulted in to give Example 30 monomer (2.1 g, 2.3 mmol, 80.0%) as a white solid. ESI-LCMS: m/z 902 [M+H]⁺; ¹H-NMR (400 MHz, DMSO-d₆): δ 12.64 (s, 1H), 8.54 (d, J=7.6 Hz, 1H), 8.24 (d, J=7.7 Hz, 2H), 7.93-7.88 (m, 2H), 7.67-7.58 (m, 1H), 7.56-7.42 (m, 3H), 7.41-7.29 (m, 2H), 7.27-7.08 (m, 7H), 6.82-6.64 (m, 4H), 6.37-6.18 (m, 1H), 6.03-5.72 (m, 1H), 5.26-4.83 (m, 1H), 4.28-4.12 (m, 1H), 3.88-3.72 (m, 1H), 3.71-3.37 (m, 9H), 3.15-3.00 (m, 1H), 2.83-2.75 (m, 1H), 2.66-2.57 (m, 1H), 1.21-0.88 (m, 12H). ¹⁹F-NMR (376 MHz, DMSO-d₆): δ −189.71. ³¹P-NMR (162 MHz, DMSO-d₆): δ 149.48, 149.50, 148.95, 148.88.

### Example 31. Synthesis of Monomer

[chemical structure]

[0421] Preparation of (2): To a solution of 1 (40.0 g, 79.3 mmol), 1a (7.6 g, 80.1 mmol) in ACN (100 mL). Then added BSA (35.2 g, 174.4 mmol) under N₂ atmosphere. The mixture was stirred at 50° C. for 1 h until the solution was clear. Then cool down to 0° C. and dropped TMSOTf (18.5 g, 83.2 mmol). The mixture was stirred at 75° C. for 1 h, TLC showed 1 was consumed completely. Then the solution was diluted with EA, washed with H₂O twice. The solvent was concentrated under reduced pressure and the residue was used for next step. ESI-LCMS: m/z 540 [M+H]⁺.

[0422] Preparation of (3): To a solution of 2 (37.1 g, 68.7 mmol) in 30% CH₂NH₂/MeOH solution (200 mL). The mixture was stirred at 25° C. for 2 h. TLC showed 2 was consumed completely. The solvent was concentrated under reduced pressure and the residue was washed with EA twice to give 3 (12.5 g, 55.2 mmol) (ref for intermediate 3 Bioorganic & Medicinal Chemistry Letters, 1996, Vol. 6, No. 4, pp. 373-378,) which was used directly for the next step. ESI-LCMS: m/z 228 [M+H]⁺.

[0423] Preparation of (4): To a solution of 3 (12.5 g, 55.2 mmol) in pyridine (125 mL) and added DMAP (1.3 g, 11.0 mmol), TrtCl (30.7 g, 110.5 mmol). The mixture was stirred at r.t. for 24 h. TLC showed 3 was consumed completely. H₂O was added to the mixture. Then filtered and the solution diluted with EA. The organic layer was washed with NaHCO₃ and brine. The solvent was concentrated under reduced pressure and then added ACN, filtered to give 4a (17.0 g, 35.4 mmol, 64% yield) as a white solid.

[0424] To a solution of 4a (17.0 g, 35.4 mmol) in DMF (200 mL), collidine (5.2 g, 43.5 mmol), TrCl (13.1 g, 47.1 mmol) were added after 2 h and then again after 3 h TrCl (13.1 g, 47.1 mmol), AgNO₃ (8.0 g, 47.1 mmol). The mixture was stirred at 25° C. for 24 h. TLC showed 4a was consumed completely. Then filtered and the solution diluted with EA. The organic layer was washed with NaHCO₃ and brine. The solvent was concentrated under reduced pressure and then added ACN, filtered to get 4 (14.2 g, 19.5 mmol, 54% yield) as a white solid. ESI-LCMS: m/z 712 [M+H]⁺; ¹H-NMR (400 MHz, DMSO-d₆): δ 7.83 (d, J=8 Hz, 2H), 7.42-7.20 (m, 30H), 6.18 (d, J=7 Hz, 1H), 6.09 (d, J=8 Hz, 2H), 5.60 (d, J=7 Hz, 1H), 4.22 (m, 1H), 3.90 (d, J=5 Hz, 1H), 2.85 (d, J=10 Hz, 1H), 2.76 (s, 1H), 2.55-2.50 (dd, 1H).

[0425] Preparation of (5): To a solution of 4 (14.2 g, 19.9 mmol) in DCM (150 mL), DMAP (2.4 g, 19.9 mmol), TEA (4.0 g, 39.9 mmol, 5.6 mL) were added. Then cool down to 0° C., TfCl (6.7 g, 39.9 mmol) dissolved in DCM (150 mL) were dropped. The mixture was stirred at 25° C. for 1 h. TLC showed 4 was consumed completely. Then filtered and the solution diluted with EA. The organic layer was washed with NaHCO₃ and brine. The solvent was concentrated under reduced pressure to get 5 (16.8 g, 19.9 mmol) as a brown solid. ESI-LCMS: m/z 844 [M+H]⁺.

[0426] Preparation of (6): To a solution of 5 (16.8 g, 19.9 mmol) in DMF (200 mL), KOAc (9.7 g, 99.6 mmol) were added, The mixture was stirred at 25° C. for 14 h and 50° C. for 3 h, TLC showed 5 was consumed completely. Then filtered and the solution diluted with EA. The organic layer was washed with H₂O and brine. The solvent was concentrated under reduced pressure to get 6a (15.0 g, 18.9 mmol, 90% yield) as a brown solid. To a solution of 6a (15.0 g, 19.9 mmol) in 30% CH₃NH₂/MeOH solution (100 mL) were added. The mixture was stirred at 25° C. for 2 h, TLC showed 6a was consumed completely. Then the solvent was concentrated under reduced pressure and the residue was purified by cc (0-5% MeOH in DCM) to give 6 (11.6 g, 16.3 mmol, 82% yield) as a yellow solid. ESI-LCMS: m/z 712 [M+H]⁺; ¹H-NMR (400 MHz, DMSO-d₆): δ 7.59 (d, J=8 Hz, 2H), 7.37-7.22 (m, 30H), 6.01 (d, J=8 Hz, 2H), 5.84 (d, J=3 Hz, 1H), 5.42 (d, J=4 Hz, 1H), 3.78-3.70 (m, 3H), 3.10 (t, J=9 Hz, 1H), 2.53 (d, J=4 Hz, 6H), 1.77 (s, 6H).

[0427] Preparation of (7): To a solution of 6 (11.6 g, 16.32 mmol) in DCM (200 mL), DAST (7.9 g, 48.9 mmol) were added at 0° C., The mixture was stirred at 25° C. for 16 h, TLC showed 6 was consumed completely. Then the solution was diluted with EA, washed with NaHCO₃ twice, The solvent was concentrated under reduced pressure the residue purified by Flash-Prep-HPLC with the following conditions (IntelFlash-1): Column, C18 silica gel; mobile phase, CH₃CN/H₂O (0.5% NH₄HCO₃)=1/1 increasing to CH₃CN/H₂O (0.5% NH₄HCO₃)=1/0 within 25 min, the eluted product was collected at CH₃CN/H₂O (0.5% NH₄HCO₃)=4/1; Detector, UV 254 nm. This resulted in to give 7 (11.6 g, 13.8 mmol, 84% yield) as a white solid. ESI-LCMS: m/z 714 [M+H]⁺.

[0428] Preparation of (8): To a solution of 7 (11.6 g, 16.2 mmol) in DCM (100 mL) was added TFA (10 mL). The mixture was stirred at 20° C. for 1 h. TLC showed 7 was consumed completely. Then the solution was concentrated under reduced pressure the residue was purified by silica gel column (0˜20% MeOH in DCM) and Flash-Prep-HPLC with the following conditions (IntelFlash-1): Column, C18 silica gel; mobile phase, CH₃CN/H₂O (0.5% NH₄HCO₃)=0/1 increasing to CH₃CN/H₂O (0.5% NH₄HCO₃)=1/3 within 25 min, the eluted product was collected at CH₃CN/H₂O (0.5% NH₄HCO₃)=0/1; Detector, UV 254 nm. This resulted in to give 9 (1.7 g, 7.2 mmol, 45% yield) as a white solid. ESI-LCMS: m/z 229.9 [M+H]⁺; ¹H-NMR (400 MHz, DMSO-d₆): δ 7.91 (d, J=8 Hz, 2H), 6.14 (d, J=8 Hz, 2H), 5.81-5.76 (m, 2H), 5.28 (t, J=5 Hz, 1H), 5.13-4.97 (t, J=4 Hz, 1H), 4.23 (m, 1H), 3.97 (m, 1H), 3.74-3.58 (m, 2H); ¹⁹F-NMR (376 MHz, DMSO-d₆): δ −206.09.

[0429] Preparation of (9): To a solution of 8 (1.4 g, 6.1 mmol) in pyridine (14 mL) was added DMTrCl (2.5 g, 7.3 mmol) at 20° C. The mixture was stirred at 20° C. for 1 h. TLC showed 8 was consumed completely. Water was added to the reaction. The product was extracted with EA, The organic layer was washed with NaHCO₃ and brine. Then the solution was concentrated under reduced pressure and the residue was purified by Flash-Prep-HPLC with the following conditions (IntelFlash-1): Column, C18 silica gel; mobile phase, CH₃CN/H₂O (0.5% NH₄HCO₃)=1/3 increasing to CH₃CN/H₂O (0.5% NH₄HCO₃)=4/1 within 25 min, the eluted product was collected at CH₃CN/H₂O (0.5% NH₄HCO₃)=1/1; Detector, UV 254 nm. This resulted in to give 9 (2.5 g, 4.6 mmol, 76 yield) as a white solid. ESI-LCMS: m/z 532.2 [M+H]⁺; ¹H-NMR (400 MHz, DMSO-d₆): δ 7.87-7.84 (m, 2H), 7.40-7.22 (m, 9H), 6.91-6.87 (m, 4H), 5.98-5.95 (m, 2H), 5.88-5.77 (m, 2H), 5.16-5.02 (m, 1H), 4.42 (m, 1H), 4.05 (m, 1H), 3.74 (s, 6H), 3.35 (m, 2H); ¹⁹F-NMR (376 MHz, DMSO-d₆): δ −202.32.

[0430] Preparation of Example 31 monomer: To a solution of 9 (2.2 g, 4.1 mmol) in DCM (20 mL) was added DCI (415 mg, 3.5 mmol) and CEP (1.5 g, 4.9 mmol) under N₂ pro. The mixture was stirred at 20° C. for 0.5 h. TLC showed 9 was consumed completely. The product was extracted with DCM, The organic layer was washed with H₂O and brine. Then the solution was concentrated under reduced pressure and the residue was purified by Flash-Prep-HPLC with the following conditions (IntelFlash-1): Column, C18 silica gel; mobile phase, CH₃CN/H₂O (0.5% NH₄HCO₃)=1/3 increasing to CH₃CN/H₂O (0.5% NH₄HCO₃)=1/0 within 25 min, the eluted product was collected at CH₃CN/H₂O (0.5% NH₄HCO₃)=1/0; Detector, UV 254 nm. This resulted in to give Example 31 monomer (2.6 g, 3.5 mmol, 85% yield) as a white solid. ESI-LCMS: m/z 732.2 [M+H]⁺; ¹H-NMR (400 MHz, DMSO-d₆): δ 7.87-7.84 (m, 2H), 7.40-7.22 (m, 9H), 6.91-6.87 (m, 4H), 5.98-5.95 (m, 2H), 5.90-5.88 (m, 1H), 5.30-5.17 (m, 1H), 4.62 (m, 1H), 4.19 (m, 1H), 3.78-3.73 (m, 7H), 3.62-3.35 (m, 5H), 2.78 (t, J=5 Hz, 1H), 2.63 (t, J=6 Hz, 1H), 1.14-0.96 (m, 12H); ¹⁹F-NMR (376 MHz, DMSO-d₆): δ −200.77, 200.80, 201.62, 201.64. ³¹P-NMR (162 MHz, DMSO-d₆): δ 150.31, 150.24, 149.66, 149.60.

### Example 32. Synthesis of End Cap Monomer

[chemical structure]

[0431] Preparation of (8): To a stirred solution of 7 (13.4 g, 35.5 mmol, Scheme 5) in DMSO (135 mL) were added EDCI (6.3 g, 32.9 mmol) and pyridine (0.9 g, 10.9 mmol), TFA (0.6 g, 5.5 mmol) at r.t. And the reaction mixture was stirred at r.t for 2 h. LCMS showed 7 consumed completely. The reaction was quenched with water and the product was extracted with EA (1800 mL). The organic phase was washed by brine, dried over Na₂SO₄, The organic phase was evaporated to dryness under reduced pressure to give a residue 8 (13.2 g, 35.3 mmol, 99.3% yield). Which was used directly to next step. ESI-LCMS: m/z=375 [M+H₂O]⁺

[0432] Preparation of (10): A solution of 8 (13.2 g, 35.3 mmol), 9 (26.8 g, 42.3 mmol, Scheme 18) and K2CO3 (19.5 g, 141.0 mmol) in dry THF (160 mL) and D₂O (53 mL) was stirred at r.t. 17 h. LCMS showed most of 8 was consumed. The product was extracted with EA (2500 mL) and the organic layer was washed with brine and dried over Na₂SO₄. Then the organic layer was concentrated to give a residue which was purified by c.c. (PE:EA=10:1˜1:2) to give product 10 (8.1 g, 11.8 mmol, 33.4%0 yield) as a white solid. ESI-LCMS m/z=682 [M+H]⁺; ¹H-NMR (400 MHz, DMSO-d₆): δ 11.42 (s, 1H), 7.69-7.71 (d, J=8.1 Hz, 1H), 5.78-5.79 (d, J=3.7 Hz, 1H), 5.65-5.67 (m, 1H), 5.59-5.63 (m, 4H), 4.29-4.35 (m, 2H), 3.97-3.99 (m, 1H), 1.15 (s, 18H), 0.87 (s, 9H), 0.07-0.08 (d, J=5.1 Hz, 6H). ³¹P-NMR (162 MHz, DMS O-d₆) δ 16.62.

[0433] Preparation of (11): To a round-bottom flask was added 10 (7.7 g, 11.1 mmol) in a mixture of HCOOH (80 mL) and H₂O (80 mL). The reaction mixture was stirred at 40° C. for 3 h. LCMS showed the 10 was consumed completely. The reaction mixture was adjusted the pH=7.0 with con·NH₃·H₂O (100 mL). Then the mixture was extracted with DCM (100 mL*3). The combined DCM layer was dried over Na₂SO₄. Filtered and filtrate was concentrated to give crude which was purified by Flash-Prep-HPLC with the following conditions (IntelFlash-1): Column, C18 silica gel; mobile phase, CH₃CN/H₂O (0.5% NH₄HCO₃)=1/2 increasing to CH₃CN/H₂O (0.5% NH₄HCO₃)=1/1 within 20 min, the eluted product was collected at CH₃CN/H₂O (0.5% NH₄HCO₃)=1/0; Detector, UV 254 nm. To give product 11 (5.5 g, 9.6 mmol, 86.1% yield) as a white solid. ESI-LCMS m/z=568 [M+H]⁺; ¹H-NMR (400 MHz, DMSO-d₆): δ 11.42 (s, 1H, exchanged with D₂O), 7.62-7.64 (d, J=8.1, 1H), 5.81-5.82 (d, J=4.3, 1H), 5.58-5.66 (m, 5H), 5.52-5.53 (d, J=6.6, 1H), 4.34-4.37 (m, 1H), 4.09-4.13 (m, 1H), 3.94-3.96 (t, J=9.7, 1H), 1.15 (s, 18H), 0 (s, 1H). ³¹P NMR (162 MHz, DMSO-d₆) δ 17.16.

[0434] Preparation of Example 32 monomer: To a solution of 11 (5.3 g, 9.3 mmol) in DCM (40 mL) was added the DCI (1.1 g, 7.9 mmol), then CEP[N(ipr)₂]₂ (3.4 g, 11.2 mmol) was added. The mixture was stirred at r.t. for 1 h. LCMS showed 11 consumed completely. The reaction mixture was washed with H₂O (50 mL*2) and brine (50 mL*1). Dried over Na₂SO₄ and concentrated to give crude which was purified by Flash-Prep-HPLC with the following conditions (IntelFlash-1): Column, C18 silica gel; mobile phase, CH₃CN/H₂O (0.5% NH₄HCO₃)=1/3 increasing to CH₃CN/H₂O (0.5% NH₄HCO₃)=1/0 within 20 min, the eluted product was collected at CH₃CN/H₂O (0.5% NH₄HCO₃)=1/0; Detector, UV 254 nm. The product was concentrated to give Example 32 monomer (6.2 g, 8.0 mmol, 85.6% yield) as a white solid. ESI-LCMS m/z=768 [M+H]⁺; ¹H-NMR (400 MHz, DMSO-d₆): δ 11.43 (s, 1H), 7.68-7.71 (m, 1H), 5.79-5.81 (m, 1H), 5.58-5.67 (m, 5H), 4.34-4.56 (m, 2H), 4.14-4.17 (m, 1H), 3.54-3.85 (m, 4H), 2.78-2.81 (m, 2H), 1.13-1.17 (m, 30H). ³¹P-NMR (162 MHz, DMSO-d₆): δ 149.66, 149.16, 16.84, 16.56.

### Example 33. Synthesis of Monomer

[chemical structure]

[0435] Preparation of (2): To a solution of 1 (20.0 g, 66.4 mmol) in dry DMF (400 mL) was added sodium hydride (1.9 g, 79.7 mmol) for 30 min, then was added CD₃I (9.1 g, 79.7 mmol) in dry DCM (40 mL) at −20° C. for 5.5 hr. LCMS showed the reaction was consumed. The mixture was filtered and the clear solution was evaporated to dryness and was evaporated with CH₃OH. The crude was purified by silica gel column (SiO2, DCM/MeOH=50:1˜10:1). This resulted in to give the product 2 (7.5 g, 23.5 mmol, 35.5% yield) as a solid. ESI-LCMS: m/z 319 [M+H]⁺; ¹H-NMR (400 MHz, DMSO-d₃): δ=8.38 (m, 1H), 6.97 (m, 2H), 5.93-5.81 (m, 1H), 5.27-5.26 (d, J=4 Hz, 1H), 5.13-5.11 (m, 1H), 4.39-4.31 (m, 1H), 4.31-4.25 (m, 1H), 3.96-3.94 (m, 1H), 3.66-3.63 (m, 1H), 3.63-3.56 (m, 1H).

[0436] Preparation of (3): To a solution of 2 (7.5 g, 23.5 mmol) in dry DMF (75 mL) was added Imidazole (5.6 g, 82.3 mmol) and TBSCl (8.9 g, 58.8 mmol). The mixture was stirred at r.t. over night. LCMS showed 2 was consumed completely. The reaction was quenched with water (300 mL). The product was extracted into ethyl acetate (100 mL). The organic layer was washed with brine and dried over anhydrous Na₂SO₄. The solvent was removed to give the cured 3 (9.8 g) as a solid which used for the next step. ESI-LCMS: m/z 547 [M+H]⁺.

[0437] Preparation of (4): To a solution of 3 (9.8 g) in THF (40 mL) was added TFA (10 mL) and water (10 mL) at 0° C. The reaction mixture was stirred at 0° C. for 5 h. LC-MS showed 3 was consumed completely. Con. NH₄OH was added to the mixture at 0° C. to quench the reaction until the pH=7.5. The product was extracted into ethyl acetate (200 mL). The organic layer was washed with brine and dried over anhydrous Na₂SO₄. The solvent was removed to give the cured 4 (8.4 g) as a solid which used for the next step. ESI-LCMS: m/z 433 [M+H]⁺.

[0438] Preparation of (5): To a solution of 4 (8.4 g) in DCM/H₂O=2:1 (84 mL) was added DAIB (18.8 g, 58.4 mmol) and TEMPO (0.87 g, 5.8 mmol). The reaction mixture was stirred at 40° C. for 2 h. LCMS showed 4 was consumed. The mixture was diluted with DCM and water was added. The product was extracted with DCM. The organic layer was washed with brine and dried over anhydrous Na₂SO₄. The solution was then concentrated under reduced pressure. This resulted in to give 5 (14.4 g) as a white solid. ESI-LCMS: m/z 447 [M+H]⁺.

[0439] Preparation of (6): To a solution of 5 (14.4 g) in toluene (90 mL) and methanol (60 mL) was added 2M TMSCHN₂ (8.9 g, 78.1 mmol) till the yellow color not disappear at r.t. for 10 min. LCMS showed 5 was consumed. The crude was purified by Flash-Prep-HPLC with the following conditions (IntelFlash-1): Column, C18 silica gel; mobile phase, CH₃CN/H₂O (0.5% NH₄HCO₃)=1/1 increasing to CH₃CN/H₂O (0.5% NH₄HCO₃)=1/0 within 25 min, the eluted product was collected at CH₃CN/H₂O (0.5% NH₄HCO₃)=65/35 Detector, UV 254 nm. This resulted in to give the product 6 (3.5 g, 7.6 mmol, 32.3% yield over three steps, 70% purity) as a white solid. ESI-LCMS: m/z 461 [M+H]⁺.

[0440] Preparation of (7): To the solution of 6 (3.5 g, 7.6 mmol) in dry THF/MeOD/D₂O=10/2/1 (45 mL) was added NaBD₄ (0.96 g, 22.8 mmol). And the reaction mixture was stirred at r.t for 2.5 hr. After completion of reaction, the resulting mixture was added CH₃COOD to pH=7, after addition of water, the resulting mixture was extracted with EA (100 mL). The combined organic layer was washed with water and brine, dried over Na₂SO₄, and concentrated to give 7 (3.3 g) which was used for the next step. ESI-LCMS: m/z 435 [M+H]⁺.

[0441] Preparation of (8): To a solution of 7 (3.3 g) in dry DCM (30 mL) was added pyridine (5.9 g, 74.5 mmol) and iBuCl (2.4 g, 22.4 mmol) in DCM (6 mL) under ice bath. The reaction mixture was stirred at 0° C. for 2.5 hr. LCMS showed 7 was consumed. The mixture was diluted with EA and water was added. The product was extracted with EA. The crude was purified by Flash-Prep-HPLC with the following conditions (IntelFlash-1): Column, C18 silica gel; mobile phase, CH₃CN/H₂O (0.5% NH₄HCO₃)=1/1 increasing to CH₃CN/H₂O (0.5% NH₄HCO₃)=1/0 within 25 min, the eluted product was collected at CH₃CN/H₂O (0.5% NH₄HCO₃)=87/13; Detector, UV 254 nm. This resulted in to give the crude 8 (1.6 g, 2.8 mmol, 36.8% yield over two steps) as a white solid. ESI-LCMS: m/z 575 [M+H]⁺.

[0442] Preparation of (9): To a solution of 8 (1.6 g, 2.8 mmol,) in H₂O/dioxane=1:1 (30 ml) was added K2CO3 (772.8 mg, 5.6 mmol) and DABCO (739.2 mg, 2.9 mmol). The reaction mixture was stirred at 50° C. for 3 hr. LCMS showed 8 was consumed. The mixture was diluted with EA and water was added. The product was extracted with EA. The combined organic layer was washed with water and brine, dried over Na₂SO₄, and concentrated to give 9 (1.8 g) which was used for the next step. ESI-LCMS: m/z 557 [M+H]⁺.

[0443] Preparation of (10): To a solution of 9 (1.8 g) in pyridine (20 mL) and was added 2M NaOH (MeOH/H₂O=4/1) (5 mL) at 0° C. for 1 h. LCMS showed 9 was consumed. The mixture was added saturated NH₄C1 till pH=7.5. The mixture was diluted with water and EA. The organic layer was washed with brine and dried over Na₂SO₄ and concentrated to give the crude. This resulted in to give the product 10 (1.5 g) as a white solid which was used for the next step. ESI-LCMS: m/z 487 [M+H]⁺.

[0444] Preparation of (11): To a stirred solution of 10 (1.5 g) in pyridine (20 mL) were added DMTrCl (1.1 g, 3 mmol) at r.t. And the reaction mixture was stirred at r.t for 2.5 hr. With ice-bath cooling, the reaction was quenched with water and the product was extracted into EA. The organic layer was washed with brine and dried over Na₂SO₄ and concentrated to give the crude. The crude was purified by Flash-Prep-HPLC with the following conditions (IntelFlash-1): Column, C18 silica gel; mobile phase, CH₃CN/H₂O (0.5% NH₄HCO₃)=1/1 increasing to CH₃CN/H₂O (0.5% NH₄HCO₃)=1/0 within 25 min, the eluted product was collected at CH₃CN/H₂O (0.5% NH₄HCO₃)=7/3 Detector, UV 254 nm. This resulted in to give the product 11 (1.9 g, 2.4 mmol, 85.7% yield over two steps) as a white solid. ESI-LCMS: m/z 789.3 [M+H]⁺; ¹H-NMR (400 MHz, DMSO-d₆): δ 12.10 (m, 1H), 11.63 (m, 1H), 8.20 (m, 1H), 7.35-7.33 (m, 2H), 7.29-7.19 (m, 7H), 6.86-6.83 (m, 4H), 5.89-5.88 (d, J=4 Hz, 1H), 4.40-4.28 (m, 2H), 3.72 (m, 6H), 2.81-2.76 (m, 1H), 1.13-1.11 (m, 6H), 0.80 (m, 9H), 0.05-0.01 (m, 7H).

[0445] Preparation of (12): To a solution of 11 (1.9 g, 2.4 mmol) in THF (20 mL) was added 1 M TBAF solution (3 mL). The reaction mixture was stirred at r.t. for 1.5 h. LCMS showed 11 was consumed completely. Water (100 mL) was added. The product was extracted with EA (50 mL) and the organic layer was washed with brine and dried over Na₂SO₄. Then the organic layer was concentrated to give a residue which was purified by Flash-Prep-HPLC with the following conditions (IntelFlash-1): Column, C18 silica gel; mobile phase, CH₃CN/H₂O (0.5% NH₄HCO₃)=2/3 increasing to CH₃CN/H₂O (0.5% NH₄HCO₃)=1/0 within 20 min, the eluted product was collected at CH₃CN/H₂O (0.5% NH₄HCO₃)=58/42; Detector, UV 254 nm. This resulted in to give 12 (1.5 g, 2.2 mmol, 91.6% yield) as a white solid. ESI-LCMS: m/z 675.3 [M+H]⁺; ¹H-NMR (400 MHz, DMSO-d₆): δ 12.09 (m, 1H), 11.60 (m, 1H), 8.14 (m, 1H), 7.35-7.27 (m, 2H), 7.25-7.20 (m, 7H), 6.85-6.80 (m, 4H), 5.96-5.94 (d, J=8 Hz, 1H), 5.26-5.24 (m, 1H), 4.35-4.28 (m, 2H), 3.72 (m, 6H), 3.32 (m, 1H), 2.79-2.72 (m, 1H), 1.13-1.11 (m, 6H).

[0446] Preparation of Example 33 monomer: To a suspension of 11 (1.5 g, 2.2 mmol) in DCM (15 mL) was added DCI (220.8 mg, 1.9 mmol) and CEP[N(iPr)₂]₂ (795.7 mg, 2.6 mmol) under N₂ pro. The mixture was stirred at r.t. for 2 h. LCMS showed 11 was consumed completely. The solution was washed with water twice and washed with brine and dried over Na₂SO₄. Then concentrated to give a residue which was purified by Flash-Prep-HPLC with the following conditions (IntelFlash-1): Column, C18 silica gel; mobile phase, CH₃CN/H₂O (0.5% NH₄HCO₃)=1/1 increasing to CH₃CN/H₂O (0.5% NH₄HCO₃)=1/0 within 20 min, the eluted product was collected at CH₃CN/H₂O (0.5% NH₄HCO₃)=4/1; Detector, UV 254 nm. This resulted in to give Example 33 monomer (1.6 g, 1.8 mmol, 83% yield) as a white solid. ESI-LCMS: m/z 875 [M+H]⁺; ¹H-NMR (400 MHz, DMSO-d₆): δ 12.12 (m, 1H), 11.60 (m, 1H), 8.15 (m, 1H), 7.37-7.29 (m, 2H), 7.27-7.20 (m, 7H), 6.86-6.81 (m, 4H), 5.94-5.88 (m, 1H), 4.54-4.51 (m, 2H), 4.21-4.20 (m, 1H), 3.73-3.54 (m, 1OH), 2.80-2.75 (m, 1H), 2.61-2.58 (m, 1H), 1.19-1.11 (m, 19H). ³¹P-NMR (162 MHz, DMSO-d₆): δ=149.77, 149.71.

### Example 34. Synthesis of Monomer

[chemical structure]

[0447] Preparation of (2): To a solution of 1 (50.0 g, 99.2 mmol) and 1a (11.3 g, 119.0 mmol) in ACN (500.0 mL). Then added BSA (53.2 g, 218.0 mmol) under N₂ Pro. The mixture was stirred at 50° C. for 1 h until the solution was clear. Then cool down to 0° C. and dropped TMSOTf (26.4 g, 119.0 mmol). The mixture was stirred at 75° C. for 1 h, TLC showed 1 was consumed completely. The reaction was quenched by sodium bicarbonate solution at 0° C., then the solution was diluted with EA, washed with H₂O twice. The solvent was concentrated under reduced pressure and the crude 2 (60.1 g) was used for next step. ESI-LCMS: m/z 540.2 [M+H]⁺.

[0448] Preparation of (3): To a solution of 2 (60.1 g) in CH₃NH₂/ethanol (500.0 mL). The mixture was stirred at 25° C. for 2 h. TLC showed 2 was consumed completely. The solvent was concentrated under reduced pressure and the residue was purified by c.c. (MeOH:DCM=50:1˜10:1) to give 3 (22.0 g, 96.9 mmol, 97.3% yield over two steps). ESI-LCMS: m/z 228.0 [M+H]⁺; ¹H-NMR (400 MHz, DMSO-d₆): δ 8.01-7.98 (m, 1H), 7.43-7.38 (m, 1H), 6.37-6.35 (m, 1H), 6.27-6.23 (m, 1H), 6.03 (d, J=3.5 Hz, 1H), 5.39 (d, J=4.2 Hz, 1H), 5.11 (t, J=5.1 Hz, 1H), 5.03 (d, J=5.1 Hz, 1H), 3.98-3.95 (m, 2H), 3.91-3.88 (m, 1H), 3.74-3.57 (m, 2H).

[0449] Preparation of (4): To a solution of 3 (22.0 g, 96.9 mmol) in pyridine (250.0 mL), TrtCl (30.7 g, 110.5 mmol) was added. The mixture was stirred at 25° C. for 24 h. TLC showed 3 was consumed completely, H₂O was added to the mixture. Then filtered and the filtrate diluted with EA, the organic layer was washed with NaHCO₃ and brine. The solvent was concentrated under reduced pressure and then purified by c.c. (PE/EA=5:1˜0:1) to give 4 (38.8 g, 82.5 mmol, 85.1% yield) as a white solid. ESI-LCMS: m/z 470.1 [M+H]⁺.

[0450] Preparation of (5): To a solution of 4 (38.8 g, 82.5 mmol) in DMF (500.0 mL), collidine (10.0 g, 107.3 mmol), TrtCl (27.6 g, 99.1 mmol) were added followed by AgNO₃ (18.0 g, 105.1 mmol). The mixture was stirred at 25° C. for 4 h. TLC showed 4 was consumed completely. Then filtered and the filtrate diluted with EA. The organic layer was washed with NaHCO₃ and brine. The solvent was concentrated under reduced pressure and then purified by c.c. (PE/EA=5:1˜1:1) to give a mixture of 5 (52.3 g, 73.5 mmol, 86.3% yield) as white solid. ESI-LCMS: m/z 711.1 [M+H]⁺.

[0451] Preparation of (6): To a solution of 5 (52.3 g, 73.5 mmol) in DCM (500.0 mL), DMAP (8.9 g, 73.5 mmol), TEA (14.9 g, 147.3 mmol, 20.6 mL) were added, cool down to 0° C., TfCl (16.1 g, 95.6 mmol) dissolved in DCM (100.0 mL) were dropped. The mixture was stirred at 25° C. for 1 h. TLC showed 5 was consumed completely. Then filtered and the solution diluted with EA. The organic layer was washed with NaHCO₃ and brine. The solvent was concentrated under reduced pressure to get crude 6 (60.2 g) as a brown solid. ESI-LCMS: m/z 844.2 [M+H]⁺.

[0452] Preparation of (7): To a solution of 6 (60.2 g) in DMF (500.0 mL), KOAc (36.1 g, 367.8 mmol) were added, The mixture was stirred at 25° C. for 14 h and 50° C. for 3 h, TLC showed 6 was consumed completely. Then filtered and the solution diluted with EA. The organic layer was washed with H₂O and brine. The solvent was concentrated under reduced pressure, residue was purified by c.c. (PE/EA=5:1˜1:1) to give 7 (28.0 g, 39.3 mmol, 53.5% yield) as yellow solid. ESI-LCMS: m/z 710.2 [M−H]⁻; ¹H-NMR (400 MHz, DMSO-d₆): δ 7.37-7.25 (m, 33H), 6.34-6.31 (m, 2H), 6.13-6.10 (m, 1H), 5.08 (d, J=4.2 Hz, 1H), 3.99 (d, J=7.6 Hz, 1H), 3.74 (s, 1H), 3.12 (t, J=9.2 Hz, 1H), 2.72-2.69 (m, 1H).

[0453] Preparation of (8): To a solution of 7 (28.0 g, 39.3 mmol) in DCM (300.0 mL), DAST (31.6 g, 196.6 mmol) was added at 0° C., the mixture was stirred at 25° C. for 16 h, TLC showed 7 was consumed completely. Then the solution was diluted with EA, washed with NaHCO₃ twice, the solvent was removed under reduced pressure, residue was purified by c.c. (PE/EA=5:1˜3:1) to give 8 (5.0 g, 7.0 mmol, 17.8% yield) as a white solid. ESI-LCMS: m/z 748.2 [M+2NH₄]⁺; ¹H-NMR (400 MHz, DMSO-d₆): δ 7.57-7.18 (m, 35H), 6.30 (d, J=8.8 Hz, 1H), 6.00 (d, J=19.5 Hz, 1H), 5.92-5.88 (m, 1H), 4.22-4.17 (m, 2H), 3.94 (s, 0.5H), 3.80 (s, 0.5H), 3.35-3.31 (m, 1H), 3.14-3.10 (m, 1H); ¹⁹F-NMR (376 MHz, DMSO-d₆): δ −193.54.

[0454] Preparation of (9): To a solution of 8 (5.0 g, 7.0 mmol) in DCM (60.0 mL) was added DCA (3.6 mL) and TES (15.0 mL). The mixture was stirred at 20° C. for 1 h, TLC showed 8 was consumed completely. Then the solution was concentrated under reduced pressure, the residue was purified by Flash-Prep-HPLC with the following conditions (IntelFlash-1): Column, C18 silica gel; mobile phase, CH₃CN/H₂O (0.5% NH₄HCO₃)=0/1 increasing to CH₃CN/H₂O (0.5% NH₄HCO₃)=1/3 within 25 min, the eluted product was collected at CH₃CN/H₂O (0.5% NH₄HCO₃)=0/1; Detector, UV 254 nm. This resulted in to give 9 (1.6 g, 6.9 mmol, 98.5% yield) as a white solid. ESI-LCMS: m/z 229.9 [M+H]⁺; ¹H-NMR (400 MHz, DMSO-d₆): δ 8.06-8.04 (m, 1H), 7.48-7.43 (m, 1H), 6.39 (d, J=9.0 Hz, 1H), 6.31-6.27 (m, 1H), 6.16-6.11 (m, 1H), 5.63 (s, 1H), 5.26 (s, 1H), 4.95-4.81 (m, 1H), 4.20-411 (m, 1H), 3.95 (d, J=8.2 Hz, 1H), 3.84 (d, J=12.4 Hz, 1H), 3.64 (d, J=12.1 Hz, 1H); ¹⁹F-NMR (376 MHz, DMSO-d₆): δ −201.00.

[0455] Preparation of (10): To a solution of 9 (1.6 g, 6.9 mmol) in pyridine (20.0 mL) was added DMTrCl (3.5 g, 10.5 mmol) at 20° C. and stirred for 1 h. TLC showed 9 was consumed completely. Water was added and extracted with EA, the organic layer was washed with NaHCO₃ and brine. Then the solution was concentrated under reduced pressure and the residue was purified by Flash-Prep-HPLC with the following conditions (IntelFlash-1): Column, C18 silica gel; mobile phase, CH₃CN/H₂O (0.5% NH₄HCO₃)=1/3 increasing to CH₃CN/H₂O (0.5% NH₄HCO₃)=4/1 within 25 min, the eluted product was collected at CH₃CN/H₂O (0.5% NH₄HCO₃)=1/1; Detector, UV 254 nm. This resulted in to give 10 (2.2 g, 4.2 mmol, 60.8% yield) as a white solid. ESI-LCMS: m/z 530.1 [M−H]⁻; ¹H-NMR (400 MHz, DMSO-d₆): δ 7.93-7.91 (m, 1H), 7.47-7.23 (m, 1OH), 6.91-6.89 (m, 4H), 6.41 (d, J=8.8 Hz, 1H), 6.13 (d, J=18.8 Hz, 1H), 6.00-5.96 (m, 1H), 5.68 (d, J=6.6 Hz, 1H), 5.01 (d, J=4.2 Hz, 0.5H), 4.88 (d, J=4.2 Hz, 0.5H), 4.42-4.31 (m, 1H), 4.10-4.08 (m, 1H), 3.74 (s, 6H), 3.40-3.34 (m, 2H); ¹⁹F-NMR (376 MHz, DMSO-d₆): δ −199.49.

[0456] Preparation of Example 34 monomer: To a solution of 10 (2.2 g, 4.2 mmol) in DCM (20.0 mL) was added DCI (415 mg, 3.5 mmol) and CEP (1.5 g, 4.9 mmol) under N₂ pro. The mixture was stirred at 20° C. for 0.5 h. TLC showed 10 was consumed completely. The product was extracted with DCM, the organic layer was washed with H₂O and brine. Then the solution was concentrated under reduced pressure and the residue was purified by cc (PE/EA=5:1˜1:1) and Flash-Prep-HPLC with the following conditions (IntelFlash-1): Column, C18 silica gel; mobile phase, CH₃CN/H₂O (0.5% NH₄HCO₃)=1/3 increasing to CH₃CN/H₂O (0.5% NH₄HCO₃)=1/0 within 25 min, the eluted product was collected at CH₃CN/H₂O (0.5% NH₄HCO₃)=1/0; Detector, UV 254 nm. This resulted in to give Example 34 monomer (2.1 g, 3.0 mmol, 73.1% yield) as a white solid. ESI-ESI-LCMS: m/z 732.2 [M+H]⁺; ¹H-NMR (400 MHz, DMSO-d₆): δ 7.98-7.92 (m, 1H), 7.42-7.24 (m, 1OH), 6.91-6.85 (m, 4H), 6.43-6.39 (m, 1H), 6.18-6.11 (m, 1H), 6.01-5.97 (m, 1H), 5.22-5.19 (m, 0.5H), 5.09-5.06 (m, 0.5H), 4.73-4.52 (m, 1H), 4.21-4.19 (m, 1H), 3.79-3.62 (m, 7H), 3.57-3.47 (m, 4H), 3.32-3.28 (m, 1H), 2.75-2.58 (m, 1H), 1.13-0.92 (m, 12H); ¹⁹F-NMR (376 MHz, DMSO-d₆): δ −196.82, −196.84, −197.86, −197.88; ³¹P-NMR (162 MHz, DMSO-d₆): δ 149.88, 149.83, 149.39, 149.35.

### Example 35. Synthesis of Monomer

[chemical structure]

[0457] Preparation of (2): To the solution of Bromobenzene (2.1 g, 13.6 mmol) in dry THF (15 mL) was added 1.6 M n-BuLi (7 mL, 11.8 mmol) drop wise at −78° C. The mixture was stirred at −78° C. for 0.5 h. Then the 1 (3.0 g, 9.1 mmol, Wang, Guangyi et al, Journal of Medicinal Chemistry, 2016, 59(10), 4611-4624) was dissolved in THF (15 mL) and added to the mixture drop wise with keeping at −78° C. Then the reaction mixture was stirred at −78° C. for 1 hr. LC-MS showed 1 was consumed completely. Then the solution was added to saturated aq. NH₄C1 and the resulting mixture was extracted with EA. The combined organic layer was washed with water and brine, dried over Na₂SO₄, and concentrated under reduced pressure to give a residue which was purified by Flash-Prep-HPLC with the following conditions (IntelFlash-1): Column, C18 silica gel; mobile phase, CH₃CN/H₂O (0.5% NH₄HCO₃)=2/3 increasing to CH₃CN/H₂O (0.5% NH₄HCO₃)=4/1 within 25 min, the eluted product was collected at CH₃CN/H₂O (0.5% NH₄HCO₃)=3/2; Detector, UV 254 nm. This resulted in to give 2 (3.0 g, 7.3 mmol, 80.0%) as a white solid. ESI-LCMS: m/z 391 [M−OH]⁻.

[0458] Preparation of (3): To the solution of 2 (4.0 g, 9.8 mmol) in DCM (40 mL) was added TES (1.9 g, 11.7 mmol) at −78° C., and the mixture was added BF₃·OEt₂ (2.1 g, 14.7 mmol) drop wise at −78° C. The mixture was stirred at −40° C. for 1 hr. LC-MS showed 2 was consumed completely. Then the solution was added to saturated aq·NaHCO₃ and the resulting mixture was extracted with DCM. The combined organic layer was washed with water and brine, dried over Na₂SO₄, and concentrated under reduced pressure to give a residue which was purified by Flash-Prep-HPLC with the following conditions (IntelFlash-1): Column, C18 silica gel; mobile phase, CH₃CN/H₂O (0.5% NH₄HCO₃)=2/3 increasing to CH₃CN/H₂O (0.5% NH₄HCO₃)=4/1 within 25 min, the eluted product was collected at CH₃CN/H₂O (0.5% NH₄HCO₃)=7/3; Detector, UV 254 nm. This resulted in to give 3 (3.1 g, 5.3 mmol, 54.0%) as a water clear oil. ESI-LCMS: m/z 410 [M+H₂O]⁺; ¹H-NMR (400 MHz, CDCl₃: δ 7.48-7.25 (m, 15H), 5.24-5.13 (m, 1H), 4.93-4.74 (m, 1H), 4.74-4.46 (m, 4H), 4.37-4.25 (m, 1H), 4.19-4.05 (m, 1H), 4.00-3.80 (m, 1H), 3.77-3.63 (m, 1H). ¹⁹F-NMR (376 MHz, CDCl₃): δ −196.84.

[0459] Preparation of (4): To the solution of 3 (2.1 g, 5.3 mmol) in dry DCM (20 mL) was added 1 M BCl₃ (25 mL, 25.5 mmol) drop wise at −78° C., and the reaction mixture was stirred at −78° C. for 0.5 hr. LC-MS showed 3 was consumed completely. After completion of reaction, the resulting mixture was poured into water (50 mL). The solution was extracted with DCM and the combined organic layer was concentrated under reduced pressure to give a crude. The crude in MeOH (4 mL) was added 1 M NaOH (15 mL), and the mixture was stirred at r.t for 5˜10 min. The mixture was extracted with EA. The combined organic layer was washed with brine, dried over Na₂SO₄, and concentrated under reduced pressure to give a residue which was purified by silica gel column chromatography (eluent, DCM:MeOH=40:1˜15:1) to give 4 (1.0 g, 4.7 mmol, 88.6%) as a water clear oil. ESI-LCMS: m/z 211 [M−H]⁻; ¹H-NMR (400 MHz, DMSO-d₆): δ 7.58-7.19 (m, 5H), 5.41 (d, J=6.1 Hz, 1H), 5.09-5.95 (m, 1H), 5.95-4.84 (m, 1H), 4.82-4.59 (m, 1H), 4.14-3.94 (m, 1H), 3.89-3.80 (m, 1H), 3.78-3.67 (m, 1H), 3.65-3.53 (m, 1H). ¹⁹F-NMR (376 MHz, DMSO-d₆): δ −196.46.

[0460] Preparation of (5): To a solution of 4 (1.0 g, 4.7 mmol) in Pyridine (10 mL) was added DMTrCl (2.0 g, 5.7 mmol). The reaction mixture was stirred at r.t. for 2 hr. LCMS showed 4 was consumed and water (100 mL) was added. The product was extracted with EA (100 mL) and the organic layer was washed with brine and dried over Na₂SO₄ and concentrated to give the crude. The crude was further purified by Flash-Prep-HPLC with the following conditions (IntelFlash-1): Column, C18 silica gel; mobile phase, CH₃CN/H₂O (0.5% NH₄HCO₃)=1/1 increasing to CH₃CN/H₂O (0.5% NH₄HCO₃)=1/0 within 20 min, the eluted product was collected at CH₃CN/H₂O (0.5% NH₄HCO₃)=9/1; Detector, UV 254 nm. This resulted in to give 5 (2.1 g, 4.1 mmol, 87.0%) as a red oil. ESI-LCMS: m/z 513 [M−H]⁻; ¹H-NMR (400 MHz, DMSO-d₆): δ 7.56-7.16 (m, 14H), 6.94-9.80 (m, 4H), 5.45 (d, J=6.3 Hz, 1H), 5.21-5.09 (m, 1H), 4.89-4.68 (m, 1H), 4.18-4.03 (m, 2H), 3.74 (s, 6H), 3.33-3.29 (m, 1H), 3.26-3.17 (m, 1H). ¹⁹F-NMR (376 MHz, DMSO-d₆): δ −194.08.

[0461] Preparation of Example 35 monomer: To a suspension of 5 (2.1 g, 4.1 mmol) in DCM (20 mL) was added DCI (410 mg, 3.4 mmol) and CEP[N(iPr)₂]₂ (1.5 g, 4.9 mmol). The mixture was stirred at r.t. for 1 h. LC-MS showed 5 was consumed completely. The solution was washed with water twice and washed with brine and dried over Na₂SO₄. Then concentrated to give the crude. The crude was purification by Flash-Prep-HPLC with the following conditions (IntelFlash-1): Column, C18 silica gel; mobile phase, CH₃CN/H₂O (0.5% NH₄HCO₃)=1/1 increasing to CH₃CN/H₂O (0.5% NH₄HCO₃)=1/0 within 20 min, the eluted product was collected at CH₃CN/H₂O (0.5% NH₄HCO₃)=1/0; Detector, UV 254 nm. This resulted in to give Example 35 monomer (2.1 g, 2.9 mmol, 70.0%) as a white solid. ESI-LCMS: m/z 715 [M+H]⁺; ¹H-NMR (400 MHz, DMSO-d₆): δ 7.59-7.16 (m, 14H), 6.94-9.80 (m, 4H), 5.26-5.12 (m, 1H), 5.06-4.77 (m, 1H), 4.50-4.20 (m, 1H), 4.20-4.10 (m, 1H), 3.83-3.63 (m, 7H), 3.59-3.37 (m, 4H), 3.25-3.13 (m, 1H), 2.80-2.66 (m, 1H), 2.63-2.53 (m, 1H), 1.18-0.78 (m, 12H). ¹⁹F-NMR (376 MHz, DMSO-d₆): δ −194.40, −194.42, −194.50, −194.53. ³¹P-NMR (162 MHz, DMSO-d₆): δ 149.38, 149.30, 149.02, 148.98.

### Example 36: Synthesis of 5′ End Cap Monomer

[chemical structure]

[0462] Preparation of (2): 1 (15 g, 58.09 mmol) and tert-butyl N-methylsulfonylcarbamate (17.01 g, 87.13 mmol) were dissolved in THF (250 mL), and PPh₃ (30.47 g, 116.18 mmol) was added followed by dropwise addition of DIAD (23.49 g, 116.18 mmol, 22.59 mL) at 0° C. The reaction mixture was stirred at 15° C. for 12 h. Upon completion as monitored by TLC (DCM/MeOH=10/1), the reaction mixture was evaporated to give a residue. The residue was purified by flash silica gel chromatography (ISCO@; 120 g SepaFlash@ Silica Flash Column, Eluent of 0˜20% MeOH/DCM gradient @60 mL/min) to give 2 (6.9 g, 24.28% yield) as a white solid. ESI-LCMS: m/z 457.9 [M+Na]⁺; ¹H NMR (400 MHz, CDCl₃) δ=8.64 (br s, 1H), 7.64 (d, J=8.2 Hz, 1H), 5.88 (d, J=1.9 Hz, 1H), 5.80 (dd, J=2.2, 8.2 Hz, 1H), 4.19-4.01 (m, 3H), 3.90 (dt, J=5.5, 8.2 Hz, 1H), 3.82-3.78 (m, 1H), 3.64 (s, 3H), 3.32 (s, 3H), 2.75 (d, J=8.9 Hz, 1H), 1.56 (s, 9H).

[0463] Preparation of (3): 2 (6.9 g, 15.85 mmol) was dissolved in MeOH (40 mL), and a solution of HCl/MeOH (4 M, 7.92 mL) was added dropwise. The reaction mixture was stirred at 15° C. for 12 h, and then evaporated to give a residue. The residue was purified by flash silica gel chromatography (ISCO®; 40 g SepaFlash® Silica Flash Column, Eluent of 0˜10% MeOH/DCM gradient @40 mL/min) to give 3 (2.7 g, 50.30% yield) as a white solid. ESI-LCMS: m/z 336.0 [M+H]⁺; ¹H NMR (400 MHz, CD₃CN) δ=9.20 (br s, 1H), 7.52 (d, J=8.1 Hz, 1H), 5.75 (d, J=3.8 Hz, 1H), 5.64 (dd, J=2.0, 8.1 Hz, 1H), 5.60-5.52 (m, 1H), 4.15-3.99 (m, 1H), 3.96-3.81 (m, 2H), 3.46 (s, 3H), 3.44-3.35 (m, 1H), 3.34-3.26 (m, 1H), 2.92 (s, 3H).

[0464] Preparation of (Example 36 monomer): To a solution of 3 (2.14 g, 6.38 mmol) in DCM (20 mL) was added dropwise 3-bis(diisopropylamino)phosphanyloxypropanenitrile (2.50 g, 8.30 mmol, 2.63 mL) at 0° C., followed by 1H-imidazole-4, 5-dicarbonitrile (829 mg, 7.02 mmol), and the mixture was purged under Ar for 3 times. The reaction mixture was stirred at 15° C. for 2 h. Upon completion, the mixture was quenched with 5% NaHCO₃ (20 mL), extracted with DCM (20 mL*2), washed with brine (15 mL), dried over Na₂SO₄, filtered, and evaporated to give a residue. The residue was purified by flash silica gel chromatography (ISCO@; 40 g SepaFlash® Silica Flash Column, Eluent of 0˜10% (Phase B: i-PrOH/DCM=1/2)/Phase A: DCM with 5% TEA gradient @40 mL/min) to give Example 36 monomer (1.73 g, 48.59% yield) as a white solid. ESI-LCMS: m/z 536.3 [M+H]⁺; ¹H NMR (400 MHz, CD₃CN) δ=7.58-7.48 (m, 1H), 5.83-5.78 (m, 1H), 5.71-5.64 (m, 1H), 4.40-4.29 (m, 1H), 4.19-4.07 (m, 1H), 3.98 (td, J=5.3, 13.3 Hz, 1H), 3.90-3.78 (m, 2H), 3.73-3.59 (m, 3H), 3.41 (d, J=14.8 Hz, 4H), 2.92 (br d, J=7.0 Hz, 3H), 2.73-2.63 (m, 2H), 1.23-1.11 (m, 12H); ³¹P NMR (162 MHz, CD₃CN) δ=149.81, 150.37.

### Example 37: Synthesis of 5′ End Cap Monomer

[chemical structure]

[0465] Preparation of (2): To a solution of 1 (10 g, 27.16 mmol) in DMF (23 mL) were added imidazole (3.70 g, 54.33 mmol) and TBSCl (8.19 g, 54.33 mmol) at 25° C. The mixture was stirred at 25° C. for 2 hr. Upon completion, the reaction mixture was diluted with H₂O (20 mL) and extracted with EA (30 mL*2). The combined organic layers were washed with brine (20 mL*2), dried over Na₂SO₄, filtered and concentrated under reduced pressure to give 2 (13 g, 99.2% yield) as a white solid. ESI-LCMS: m/z 482.9 [M+H]⁺.

[0466] Preparation of (3): To a solution of 2 (35.00 g, 72.56 mmol) in DMF (200 mL) was added NaN₃ (14.15 g, 217.67 mmol). The mixture was stirred at 60° C. for 17 h. Upon completion, the reaction mixture was diluted with H₂O (200 mL) and extracted with EA (200 mL*2). The combined organic layers were washed with brine (100 mL*2), dried over Na₂SO₄, filtered and concentrated under reduced pressure to give 3 (31.8 g, crude) as a yellow solid. ESI-LCMS: m/z 398.1 [M+H]⁺; ¹H NMR (400 MHz, DMSO-d₆) δ=11.21 (d, J=1.3 Hz, 1H), 7.50 (d, J=8.1 Hz, 1H), 5.57 (d, J=4.5 Hz, 1H), 5.46 (dd, J=2.1, 8.0 Hz, 1H), 4.06 (t, J=5.2 Hz, 1H), 3.81-3.64 (m, 2H), 3.44-3.30 (m, 2H), 2.31-2.25 (m, 3H), 0.65 (s, 9H), −0.13 (s, 6H).

[0467] Preparation of (4): To a solution of 3 (7 g, 17.61 mmol) in THF (60 mL) was added Pd/C (2 g) at 25° C. The reaction mixture was stirred at 25° C. for 3 h under H₂ atmosphere (15 PSI). The reaction mixture was filtered, and the filtrate was concentrated to give 4 (5.4 g, 75.11% yield) as a gray solid. ESI-LCMS: m/z 372.1 [M+H]; ¹H NMR (400 MHz, DMSO-d₆) δ=7.93 (d, J=8.0 Hz, 1H), 5.81 (d, J=5.5 Hz, 1H), 5.65 (d, J=8.3 Hz, 1H), 4.28 (t, J=4.6 Hz, 1H), 3.88 (t, J=5.3 Hz, 1H), 3.74 (q, J=4.6 Hz, 1H), 3.31 (s, 3H), 2.83-2.66 (m, 2H), 0.88 (s, 9H), 0.09 (s, 6H).

[0468] Preparation of (5): To a solution of 4 (3 g, 8.08 mmol) in DCM (30 mL) was added TEA (2.45 g, 24.23 mmol, 3.37 mL) followed by dropwise addition of 3-chloropropane-1-sulfonyl chloride (1.50 g, 8.48 mmol, 1.03 mL) at 25° C. The reaction mixture was stirred at 25° C. for 18 h under N₂ atmosphere. Upon completion, the reaction mixture was diluted with H₂O (50 mL) and extracted with DCM (50 mL*2). The combined organic layers were washed with brine (50 mL*2), dried over Na₂SO₄, filtered and concentrated under reduced pressure. The residue was purified by flash silica gel chromatography (ISCO®; 24 g SepaFlash® Silica Flash Column, Eluent of 0˜30% MeOH/DCM @50 mL/min) to give 5 (3.6 g, 84.44% yield) as a white solid. ESI-LCMS: m/z 512.1 [M+H]; ¹H NMR (400 MHz, DMSO-d₆) δ=11.42 (s, 1H), 7.75 (d, J=8.1 Hz, 1H), 7.49 (t, J=6.2 Hz, 1H), 5.83 (d, J=5.8 Hz, 1H), 5.70-5.61 (m, 1H), 4.33-4.23 (m, 1H), 3.95 (t, J=5.5 Hz, 1H), 3.90-3.78 (m, 1H), 3.73 (t, J=6.5 Hz, 2H), 3.30 (s, 3H), 3.26-3.12 (m, 4H), 2.14-2.02 (m, 2H), 0.88 (s, 9H), 0.11 (d, J=3.3 Hz, 6H).

[0469] Preparation of (6): To a solution of 5 (5 g, 9.76 mmol) in DMF (45 mL) was added DBU (7.43 g, 48.82 mmol, 7.36 mL). The mixture was stirred at 25° C. for 16 h. The reaction mixture was concentrated to give a residue, diluted with H₂O (50 mL) and extracted with EA (50 mL*2). The combined organic layers were washed with brine (50 mL*2), dried over Na₂SO₄, filtered and concentrated under reduced pressure. The residue was purified by flash silica gel chromatography (ISCO®; 24 g SepaFlash® Silica Flash Column, Eluent of 0˜80% EA/PE @40 mL/min) to give 6 (4.4 g, 89.06% yield) as a white solid. ESI-LCMS: m/z 476.1 [M+H]⁺; ¹H NMR (400 MHz, DMSO-d₆) δ=11.43 (d, J=1.7 Hz, 1H), 7.72 (d, J=8.1 Hz, 1H), 5.82 (d, J=4.8 Hz, 1H), 5.67 (dd, J=2.1, 8.1 Hz, 1H), 4.22 (t, J=5.1 Hz, 1H), 3.99-3.87 (m, 2H), 3.33-3.27 (m, 6H), 3.09 (dd, J=6.6, 14.7 Hz, 1H), 2.26-2.16 (m, 2H), 0.88 (s, 9H), 0.10 (d, J=3.8 Hz, 6H).

[0470] Preparation of (7): To a solution of 6 (200 mg, 420.49 umol) in MeOH (2 mL) was added NH₄F (311.48 mg, 8.41 mmol, 20 eq), and the mixture was stirred at 80° C. for 2 h. The mixture was filtered and concentrated to give a residue, which was purified by flash silica gel chromatography (ISCO®; 4 g SepaFlash® Silica Flash Column, Eluent of 0˜50% MeOH/DCM @20 mL/min) to give 7 (120 mg, 76.60% yield) as a white solid. ESI-LCMS: m/z 362.1 [M+H]⁺; ¹H NMR (400 MHz, DMSO-d₆) δ=11.37 (br s, 1H), 7.68 (d, J=8.1 Hz, 1H), 5.81 (d, J=4.6 Hz, 1H), 5.65 (d, J=8.0 Hz, 1H), 4.02 (q, J=5.6 Hz, 1H), 3.95-3.83 (m, 2H), 3.34 (s, 9H), 3.09 (dd, J=6.9, 14.6 Hz, 1H), 2.26-2.14 (m, 2H).

[0471] Preparation of (Example 37 monomer): To a solution of 7 (1.5 g, 4.15 mmol) in CH₃CN (12 mL) were added 3-bis(diisopropylamino)phosphanyloxypropanenitrile (1.63 g, 5.40 mmol, 1.71 mL) and 1H-imidazole-4,5-dicarbonitrile (539.22 mg, 4.57 mmol) in one portion at 0° C. The reaction mixture was gradually warmed to 25° C. The reaction mixture was stirred at 25° C. for 2 h under N₂ atmosphere. Upon completion, the reaction mixture was diluted with NaHCO₃ (20 mL) and extracted with DCM (20 mL*2). The combined organic layers were washed with brine (20 mL*2), dried over Na₂SO₄, filtered and concentrated under reduced pressure to give a residue, which was purified by flash silica gel chromatography (ISCO®; 12 g SepaFlash® Silica Flash Column, Eluent of 0˜85% EA/PE with 0.5% TEA @30 mL/min to give Example 37 monomer (800 mg, 33.6% yield,) as a white solid. ESI-LCMS: m/z 562.3 [M+H]; ¹H NMR (400 MHz, CD₃CN) δ=9.28 (br s, 1H), 7.55 (br dd, J=8.3, 12.8 Hz, 1H), 5.86 (br d, J=3.9 Hz, 1H), 5.65 (br d, J=8.0 Hz, 1H), 4.33-4.06 (m, 2H), 4.00-3.89 (m, 1H), 4.08-3.86 (m, 1H), 3.89-3.72 (m, 4H), 3.43 (br d, J=15.1 Hz, 6H), 3.23-3.05 (m, 3H), 2.69 (br s, 2H), 2.36-2.24 (m, 2H), 1.26-1.10 (m, 12H); ³¹P NMR (162 MHz, CD₃CN) δ=149.94, 149.88.

### Example 38: Synthesis of 5′ End Cap Monomer

[chemical structure]

[0472] Preparation of (2): To a solution of 1 (30 g, 101.07 mmol, 87% purity) in CH₃CN (1.2 L) and Py (60 mL) were added I2 (33.35 g, 131.40 mmol, 26.47 mL) and PPh₃ (37.11 g, 141.50 mmol) in one portion at 10° C. The reaction was stirred at 25° C. for another 48 h. The mixture was diluted with aq·Na₂S₂O₃ (300 mL) and aq·NaHCO₃ (300 mL), concentrated to remove CH₃CN, and then extracted with EtOAc (300 mL*3). The combined organic layers were washed with brine (300 mL), dried over Na₂SO₄, filtered and concentrated under reduced pressure to give a residue. The residue was purified by flash silica gel chromatography (ISCO®; 330 g SepaFlash® Silica Flash Column, Eluent of 0˜60% Methanol/Dichloromethane gradient @ 100 mL/min) to give 2 (28.2 g, 72.00% yield, 95% purity) as a brown solid. ESI-LCMS: m/z 369.1 [M+H]⁺: 1H NMR (400 MHZ, DMSO-d₆) δ=11.43 (s, 1H), 7.68 (d, J-8.1 Hz, 1H), 5.86 (d, J=5.5 Hz, 1H), 5.69 (d, J=8.1 Hz, 1H), 5.46 (d, J=6.0 Hz, 1H), 4.08-3.96 (m, 2H), 3.90-3.81 (m, 1H), 3.60-3.51 (m, 1H), 3.40 (dd, J-6.9, 10.6 Hz, 1H), 3.34 (s, 3H).

[0473] Preparation of (3): To a solution of 2 in DMF (90 mL) were added imidazole (4.25 g, 62.48 mmol) and TBSCl (6.96 g, 46.18 mmol) in one portion at 15° C. The mixture was stirred at 15° C. for 6 h. The reaction mixture was quenched by addition of H₂O (300 mL) and extracted with EtOAc (300 mL*2). The combined organic layers were washed with brine (300 mL), dried over Na₂SO₄, filtered and concentrated under reduced pressure to give 3 (13.10 g, crude) as a white solid. ESI-LCMS: m/z 483.0 [M+H]⁺.

[0474] Preparation of (4): To a solution of 3 (10 g, 20.73 mmol) in MeOH (20 mL), H₂O (80 mL), and dioxane (20 mL) was added Na₂SO₃ (15.68 g, 124.38 mmol), and the mixture was stirred at 80° C. for 24 h. The reaction mixture was concentrated under reduced pressure to remove MeOH. The aqueous layer was extracted with EtOAc (80 mL*2) and concentrated under reduced pressure to give a residue. The residue was triturated with MeOH (100*3 mL) to give 4 (9.5 g, 94.48% yield, 90% purity) as a white solid. ESI-LCMS: m/z 437.0 [M+H]⁺.

[0475] Preparation of (5): To a solution of 4 (11 g, 21.42 mmol, 85% purity) in DCM (120 mL) was added DMF (469.65 mg, 6.43 mmol, 494.37 uL) at 0° C., followed by dropwise addition of oxalyl dichloride (13.59 g, 107.10 mmol, 9.37 mL). The mixture was stirred at 20° C. for 2 h. The reaction mixture was quenched by addition of water (60 mL) and the organic layer 5 (0.1125 M, 240 mL DCM) was used directly for next step. (This reaction was set up for two batches and combined) ESI-LCMS: m/z 455.0 [M+H]⁺.

[0476] Preparation of (6): 5 (186.4 mL, 0.1125 M in DCM) was diluted with DCM (60 mL) and treated with methylamine (3.26 g, 41.93 mmol, 40% purity). The mixture was stirred at 20° C. for 2 h. The reaction mixture was concentrated under reduced pressure to give a residue. The residue was purified by flash silica gel chromatography (ISCO®; 40 g SepaFlash® Silica Flash Column, Eluent of 0˜10%, MeOH/DCM gradient @40 mL/min) to give AGS-9-3-008 (1.82 g, 18.53% yield, 96% purity) as a yellow solid. ESI-LCMS: m/z 472.0 [M+Na]; ¹H NMR (400 MHz, CDCl₃) δ=9.08 (s, 1H), 7.31 (d, J=8.1 Hz, 1H), 5.78 (d, J=8.1 Hz, 1H), 5.57 (d, J=3.8 Hz, 1H), 4.61-4.48 (m, 1H), 4.41-4.27 (m, 2H), 4.13-4.03 (m, 1H), 3.46 (s, 3H), 3.43-3.33 (m, 2H), 2.78 (d, J=5.2 Hz, 3H), 0.92 (s, 9H), 0.13 (s, 6H).

[0477] Preparation of (7): To a solution of 6 (2.3 g, 5.12 mmol) in MeOH (12 mL) was added HCl/MeOH (4 M, 6.39 mL). The mixture was stirred at 20° C. for 2 h. The reaction mixture was concentrated under reduced pressure to give a residue. The residue was purified by flash silica gel chromatography (ISCO®; 24 g SepaFlash® Silica Flash Column, Eluent of 0-15%, MeOH/DCM gradient @30 mL/min) to give 7 (1.4 g, 79.98% yield) as a pink solid. ESI-LCMS: m/z 336.1 [M+H]⁺; ¹H NMR (400 MHz, CDCl₃) δ=9.12 (s, 1H), 7.39 (d, J=8.0 Hz, 1H), 5.79 (d, J=3.3 Hz, 1H), 5.66 (dd, J=2.1, 8.2 Hz, 1H), 5.13 (s, 1H), 4.13 (t, J=4.0, 7.4 Hz, 1H), 4.07-4.02 (m, 1H), 3.87 (dd, J=3.3, 5.5 Hz, 1H), 3.47 (s, 3H), 3.43-3.37 (m, 2H), 2.65 (d, J=4.5 Hz, 3H).

[0478] Preparation of (Example 38 monomer): To a mixture of 7 (1.7 g, 5.07 mmol) and 4A MS (1.4 g) in MeCN (18 mL) was added 3-bis(diisopropylamino)phosphanyloxypropanenitrile (1.99 g, 6.59 mmol, 2.09 mL) at 0° C., followed by addition of 1H-imidazole-4,5-dicarbonitrile (658.57 mg, 5.58 mmol) in one portion at 0° C. The mixture was stirred at 20° C. for 2 h. Upon completion, the reaction mixture was quenched by addition of sat. NaHCO₃ solution (20 mL) and diluted with DCM (40 mL). The organic layer was washed with sat. NaHCO₃ (20 mL*2), dried over Na₂SO₄, filtered and concentrated under reduced pressure to give a residue. The residue was purified by a flash silica gel column (0% to 5% i-PrOH in DCM with 5% TEA) to give Example 38 monomer (1.30 g, 46.68% yield) as a white solid. ESI-LCMS: m/z 536.2 [M+H]⁺; ¹H NMR (400 MHz, CD₃CN) δ=9.00 (s, 1H), 7.40 (d, J=8.0 Hz, 1H), 5.85-5.76 (m, 1H), 5.64 (d, J=8.0 Hz, 1H), 5.08 (d, J=5.0 Hz, 1H), 4.42-4.21 (m, 2H), 4.00 (td, J=4.6, 9.3 Hz, 1H), 3.89-3.61 (m, 4H), 3.47-3.40 (m, 4H), 3.37-3.22 (m, 1H), 2.71-2.60 (m, 5H), 1.21-1.16 (m, 11H), 1.21-1.16 (m, 1H); ³¹P NMR (162 MHz, CD₃CN) δ=150.07, 149.97

### Example 39: Synthesis of 5′ End Cap Monomer

[chemical structure]

[0479] Preparation of (2): To a solution of 1 (13.10 g, 27.16 mmol) in THF (100 mL) was added DBU (20.67 g, 135.78 mmol, 20.47 mL). The mixture was stirred at 60° C. for 6 h. Upon completion, the reaction mixture was quenched by addition of sat·NH₄C1 solution (600 mL) and extracted with EA (600 mL*2). The combined organic layers were washed with brine (100 ml), dried over Na₂SO₄, filtered and concentrated under reduced pressure to give a residue. The residue was purified by flash silica gel chromatography (ISCO®; 120 g SepaFlash® Silica Flash Column, Eluent of 0˜50% (Phase B: ethyl acetate:dichloromethane=1:1)/Phase A: petroleum ethergradient@45 mL/min) to give 2 (5.9 g, 60.1% yield,) as a white solid. ESI-LCMS: m/z 355.1 [M+H]⁺; ¹H NMR (400 MHz, DMSO-d₆) δ=11.61-11.30 (m, 1H), 7.76-7.51 (m, 1H), 6.04 (d, J=5.4 Hz, 1H), 5.75 (s, 1H), 5.73-5.67 (m, 1H), 4.78 (d, J=4.9 Hz, 1H), 4.41 (d, J=1.1 Hz, 1H), 4.30 (t, J=4.8 Hz, 1H), 4.22 (d, J=1.4 Hz, 1H), 4.13 (t, J=5.1 Hz, 1H), 4.06-3.97 (m, 1H), 3.94-3.89 (m, 1H), 3.82-3.75 (m, 1H), 3.33 (s, 3H), 3.30 (s, 2H), 1.17 (t, J=7.2 Hz, 1H), 0.89 (s, 9H), 0.16-0.09 (m, 6H).

[0480] Preparation of (3): To a solution of 2 (4 g, 11.28 mmol) in DCM (40 mL) was added Ru(II)-Pheox (214.12 mg, 338.53 umol) in one portion followed by addition of diazo(dimethoxyphosphoryl)methane (2.54 g, 16.93 mmol) dropwise at 0° C. under N₂. The reaction was stirred at 20° C. for 16 h. Upon completion, the reaction mixture was filtered and concentrated under reduced pressure to give a residue. The residue was purified by flash silica gel chromatography (ISCO®; 80 g SepaFlash® Silica Flash Column, Eluent of 0˜4% MeOH/DCM@60 mL/min) to give 3 (5 g, 86.47% yield) as a red liquid. ESI-LCMS: m/z 477.1 [M+H]⁺; ¹H NMR (400 MHz, DMSO-d₆) δ=11.46 (s, 1H), 7.49 (d, J=8.0 Hz, 1H), 6.01-5.87 (m, 1H), 5.75 (dd, J=2.0, 8.0 Hz, 1H), 4.58 (d, J=3.8 Hz, 1H), 4.23 (dd, J=3.8, 7.8 Hz, 1H), 3.80-3.68 (m, 6H), 3.30 (s, 3H), 1.65-1.46 (m, 2H), 1.28-1.16 (m, 1H), 0.91 (s, 9H), 0.10 (d, J=4.3 Hz, 6H); ³¹P NMR (162 MHz, DMSO-d₆) δ=27.5

[0481] Preparation of (4): To a mixture of 3 (2.8 g, 5.88 mmol) and NaI (1.76 g, 11.75 mmol) in CH₃CN (30 mL) was added chloromethyl 2,2-dimethylpropanoate (2.21 g, 14.69 mmol, 2.13 mL) at 25° C. The mixture was stirred at 80° C. for 40 h under Ar. The reaction mixture was filtered and concentrated under reduced pressure to give a residue. The residue was purified by flash silica gel chromatography (ISCO®; 40 g SepaFlash® Silica Flash Column, Eluent of 0˜50% Ethylacetate/Petroleum ether gradient @40 mL/min) to give 4 (2.1 g, 51.23% yield, 97% purity) as a yellow solid. ESI-LCMS: 677.3 [M+H]⁺.

[0482] Preparation of (5): A mixture of 4 (2.09 g, 3.09 mmol) in H₂O (1.5 mL) and HCOOH (741.81 mg, 15.44 mmol, 6 mL) was stirred at 15° C. for 40 h. Upon completion, the reaction mixture was quenched by saturated aq·NaHCO₃ (300 mL) and extracted with EA (300 mL*2). The combined organic layers were washed with brine (300 mL), dried over Na₂SO₄, filtered and concentrated under reduced pressure to give a residue. The residue was purified by flash silica gel chromatography (ISCO®; 20 g SepaFlash® Silica Flash Column, Eluent of 0˜5% Methanol/Dichloromethane@45 mL/min) to give 5 (1.51 g, 85.19% yield) as a yellow solid. ESI-LCMS: 585.1 [M+Na]⁺; ¹H NMR (400 MHz, DMSO-d₆) δ=11.45 (d, J=1.8 Hz, 1H), 7.44 (d, J=8.2 Hz, 1H), 6.04 (d, J=7.5 Hz, 1H), 5.78-5.51 (m, 6H), 4.39 (t, J=4.4 Hz, 1H), 4.15 (dd, J=4.3, 7.4 Hz, 1H), 4.03 (q, J=7.1 Hz, 1H), 1.99 (s, 1H), 1.66 (dd, J=8.6, 10.8 Hz, 1H), 1.55-1.29 (m, 2H), 1.18 (d, J=2.0 Hz, 18H).

[0483] Preparation of (Example 39 monomer): To a solution of 5 (2.5 g, 4.44 mmol) in MeCN (30 mL) was added 3-bis(diisopropylamino)phosphanyloxypropanenitrile (1.74 g, 5.78 mmol, 1.84 mL) at 0° C., followed by 1H-imidazole-4,5-dicarbonitrile (577.36 mg, 4.89 mmol) in one portion under Ar. The mixture was gradually warmed to 20° C. and stirred at 20° C. for 1 h. The reaction mixture was quenched by addition of sat·NaHCO₃ solution (50 mL) and diluted with DCM (250 mL). The organic layer was washed with sat·NaHCO₃ solution (50 mL*2), dried over Na₂SO₄, filtered and concentrated under reduced pressure to give a residue. The residue was purified by a flash silica gel column (0% to 50% EA/PE with 0.5% TEA) to give Example 39 monomer (1.85 g, 54.1% yield) as a white solid. ESI-LCMS: 785.2 [M+Na]⁺; ¹H NMR (400 MHz, CD₃CN) δ=9.18 (s, 1H), 7.31 (d, J=8.3 Hz, 1H), 6.06 (d, J=7.8 Hz, 1H), 5.72-5.60 (m, 5H), 4.85-4.76 (m, 1H), 4.27 (m, 1H), 3.93-3.64 (m, 4H), 3.41 (d, J=16.6 Hz, 3H), 2.80-2.62 (m, 2H), 1.76-1.49 (m, 3H), 1.23-1.19 (m, 30H); ³¹P NMR (162 MHz, CD₃CN) δ=150.66 (s), 150.30, 24.77, 24.66.

### Example 40: Synthesis of 5′ End Cap Monomer

[chemical structure]

### Example 40 Monomer

[0484] Preparation of (2): To a solution of t (15 g, 137.43 mmol) in DCM (75 mL) were added Boc₂O (31.49 g, 144.30 mmol, 33.15 mL) and DMAP (839.47 mg, 6.87 mmol, 0.05 eq) at 0° C. The mixture was stirred at 20° C. for 16 hr, and concentrated under reduced pressure to give 2 (29.9 g, crude) as a yellow oil. ¹H NM/IR (400 MHz, CDCl₃) δ=3.23 (s, 3H), 3.16 (s, 3H), 1.51 (s, 9H).

[0485] Preparation of (3): To a solution of 2 (24.9 g, 118.99 mmol) in THF (250 mL) was added n-BuLi (2.5 M, 47.60 mL) dropwise at −78° C. under Ar and stirred at −78° C. for 1 hr. P-3 (17.19 g, 118.99 mmol, 12.83 mL) was added at 0° C. and stirred for 1 hr. The reaction mixture was quenched by saturated aq. NH₄C1 (100 mL), and then extracted with EA (100 mL*2). The combined organic layers were washed with brine (100 mL*2), dried over Na₂SO₄, filtered and concentrated under reduced pressure to give a residue. The residue was purified by flash silica gel chromatography (ISCO®; 80 g SepaFlash® Silica Flash Column, Eluent of 0˜₅₀% Ethylacetate/Petroleum ethergradient @65 mL/min) to give 3 (7.1 g, 18.62% yield) as a yellow oil. ESI-LCMS: 339.9 [M+Na]; ¹H NMR (400 MHz, CDCl₃) δ=4.12 (s, 1H), 4.08 (s, 1H), 3.83 (s, 3H), 3.81 (s, 3H), 3.22 (s, 3H), 1.51 (s, 9H).

[0486] Preparation of (5): To a mixture of 4 (15 g, 40.27 mmol) and PPTS (10.12 g, 40.27 mmol) in DMSO (75 mL) was added EDCI (23.16 g, 120.81 mmol) at 20° C. The mixture was stirred at 20° C. for 4 hr. The reaction mixture was diluted with water (150 mL) and extracted with EA (150 mL*2). The combined organic layers were washed with brine (150 mL*2), dried over Na₂SO₄, filtered and concentrated under reduced pressure to give 5 (12 g, crude) as a white solid. ESI-LCMS: 371.2[M+H]⁺; ¹H NMR (400 MHz, CDCl₃) δ=9.77 (s, 1H), 7.62 (d, J=8.1 Hz, 1H), 5.83-5.76 (m, 2H), 4.53 (d, J=4.3 Hz, 1H), 4.43 (br t, J=4.4 Hz, 1H), 3.95 (br t, J=4.7 Hz, 1H), 3.47-3.35 (m, 5H), 0.92 (s, 9H), 0.13 (d, J=5.8 Hz, 6H).

[0487] Preparation of (6): To a solution of P4 (8.02 g, 25.27 mmol) in THF (40 mL) was added n-BuLi (2.5 M, 8.42 mL) dropwise under Ar at −78° C., and the mixture was stirred at −78° C. for 0.5 hr. A solution of 4 (7.8 g, 21.05 mmol) in THF (40 mL) was added dropwise. The mixture was allowed to warm to 0° C. and stirred for another 2 hr. The reaction mixture was quenched by saturated aq. NH₄C1 solution (80 mL) and extracted with EA (80 mL). The combined organic layers were washed with brine (80 mL*2), dried over Na₂SO₄, filtered and concentrated under reduced pressure to give a residue. The residue was purified by flash silica gel chromatography (ISCO®; 80 g SepaFlash® Silica Flash Column, Eluent of 0˜38% ethylacetate/petroleum ether gradient @60 mL/min) to give 7 (7.7 g, 13.43 mmol, 63.8% yield) as a white solid. ESI-LCMS: 506.2 [M-tBu]⁺; ¹H NMR (400 MHz, CDCl₃) δ=8.97 (s, 1H), 7.25 (d, J=8.3 Hz, 1H), 6.95-6.88 (m, 1H), 6.87-6.81 (m, 1H), 5.83-5.77 (m, 2H), 4.58 (dd, J=4.4, 6.7 Hz, 1H), 4.05 (dd, J=5.0, 7.5 Hz, 1H), 3.82-3.77 (m, 1H), 3.53 (s, 3H), 3.20 (s, 3H), 1.50 (s, 9H), 0.91 (s, 9H), 0.11 (d, J=2.5 Hz, 6H).

[0488] Preparation of (7): To a solution of 6 (7.7 g, 13.71 mmol) in MeOH (10 mL) was added HCl/MeOH (4 M, 51.40 mL) at 20° C. The mixture was stirred at 20° C. for 16 hr. Upon completion, the reaction mixture was concentrated under reduced pressure to remove MeOH. The residue was purified by flash silica gel chromatography (ISCO®; 80 g SepaFlash® Silica Flash Column, Eluent of 0˜4% MeOH/DCM @60 mL/min) to give 7 (4.1 g, 86.11% yield) as a white solid. ESI-LCMS: 369.9 [M+Na]⁺; ¹H NMR (400 MHz, DMSO-d₆) δ=11.44 (s, 1H), 7.66 (d, J=8.3 Hz, 1H), 7.11 (q, J=4.9 Hz, 1H), 6.69 (dd, J=6.0, 15.1 Hz, 1H), 6.56-6.47 (m, 1H), 5.82 (d, J=4.0 Hz, 1H), 5.67 (dd, J=2.0, 8.0 Hz, 1H), 5.56 (br s, 1H), 4.42 (t, J=6.1 Hz, 1H), 4.13 (t, J=5.8 Hz, 1H), 3.97 (t, J=4.8 Hz, 1H), 3.39 (s, 3H), 2.48 (d, J=5.3 Hz, 3H)

[0489] Preparation of (8): To a solution of 7 (2.5 g, 7.20 mmol) in THF (25 mL) was added Pd/C (2.5 g, 10% purity) under H₂ atmosphere, and the suspension was degassed and purged with H₂ for 3 times. The mixture was stirred under H₂ (15 Psi) at 20° C. for 1 hr. Upon completion, the reaction mixture was filtered and concentrated under reduced pressure to give a residue. The residue was purified by flash silica gel chromatography (ISCO®; 25 g SepaFlash® Silica Flash Column, Eluent of 0˜5% Ethylacetate/Petroleum ethergradient @50 mL/min) to give 8 (2.2 g, 87.49% yield,) as a white solid. ESI-LCMS: 372.1 [M+Na]⁺; ¹H NMR (400 MHz, DMSO-d₆) δ=11.40 (s, 1H), 7.62 (d, J=8.0 Hz, 1H), 6.93 (q, J=4.9 Hz, 1H), 5.76 (d, J=4.5 Hz, 1H), 5.66 (d, J=8.0 Hz, 1H), 5.26 (d, J=6.3 Hz, 1H), 3.97 (q, J=5.9 Hz, 1H), 3.91-3.79 (m, 2H), 3.36 (s, 3H), 3.14-3.00 (m, 2H), 2.56 (d, J=5.0 Hz, 3H), 2.07-1.87 (m, 2H).

[0490] Preparation of (Example 40 monomer): To a solution of 8 (2.2 g, 6.30 mmol, 1 eq) in CH₃CN (25 mL) was added P-1 (2.47 g, 8.19 mmol, 2.60 mL, 1.3 eq) at 0° C., and then 1H-imidazole-4,5-dicarbonitrile (818.07 mg, 6.93 mmol, 1.1 eq) was added in one portion at 0° C. under Ar. The mixture was stirred at 20° C. for 2 hr. Upon completion, the reaction mixture was quenched by saturated aq·NaHCO₃ (25 mL), and extracted with DCM (25 mL*2). The combined organic layers were washed with brine (25 mL*2), dried over Na₂SO₄, filtered and concentrated under reduced pressure to give a residue. The residue was purified by flash silica gel chromatography (ISCO®; 40 g SepaFlash® Silica Flash Column, Eluent of 40˜85% ethylacetate/petroleum ether gradient @40 mL/min) to give Example 40 monomer (2.15 g, 61.32% yield) as a white solid. ESI-LCMS: 572.2 [M+Na]⁺; ¹H NMR (400 MHz, CD₃CN) δ=9.32 (br s, 1H), 7.39 (d, J=8.1 Hz, 1H), 5.82-5.75 (m, 1H), 5.66 (dd, J=0.7, 8.1 Hz, 1H), 5.14 (qd, J=4.9, 9.4 Hz, 1H), 4.24-4.02 (m, 2H), 3.99-3.93 (m, 1H), 3.90-3.60 (m, 4H), 3.43 (d, J=17.5 Hz, 3H), 3.18-3.08 (m, 2H), 2.74-2.61 (m, 5H), 2.19-2.11 (m, 1H), 2.09-1.98 (m, 1H), 1.19 (ddd, J=2.4, 4.0, 6.6 Hz, 12H).³¹P NMR (162 MHz, CD₃CN) δ=149.77 (s), 149.63 (br s).

### Example 41

[chemical structure]

### Preparation of 2

[0491] Into a 5000-mL 3-necked round-bottom flask purged and maintained with an inert atmosphere of argon, was placed uridine (150.00 g, 614.24 mmol, 1.00 eq), pyridine (2.2 L), TBDPSCl (177.27 g, 644.95 mmol, 1.05 eq). The resulting solution was stirred overnight at room temperature. The resulting mixture was concentrated. The resulting solution was extracted with 3×1000 mL of dichloromethane and the organic layers combined. The resulting mixture was washed with 3×1 L of 0.5N HCl(aq.) and 2×500 mL of 0.5N NaHCO₃ (aq.). The resulting mixture was washed with 2×1 L of H₂O. The mixture was dried over anhydrous sodium sulfate. The solids were filtered out. The filtrate was concentrated. This resulted in 262 g (crude) 2. LC-MS (m/z) 483.00 [M+H]⁺; ¹H NMR (400 MHz, DMSO-d₆) δ 11.35 (d, J=2.2 Hz, 1H), 7.70 (d, J=8.1 Hz, 1H), 7.64 (m, 4H), 7.52-7.40 (m, 6H), 5.80 (d, J=4.1 Hz, 1H), 5.50 (d, J=5.1 Hz, 1H), 5.28 (dd, J=8.0, 2.2 Hz, 1H), 5.17 (d, J=5.3 Hz, 1H), 4.15-4.05 (m, 2H), 4.00-3.85 (m, 2H), 3.85-3.73 (m, 1H), 1.03 (s, 9H).

### Preparation of 3

[0492] Into a 10 L 3-necked round-bottom flask purged and maintained with an inert atmosphere of argon, was placed a solution of 2 (260.00 g, 538.7 mmol, 1.0 eq.) in MeOH (5000 mL). This was followed by the addition of a solution of NaIO₄ (126.8 g, 592.6 mmol, 1.1 eq.) in H₂O (1600 mL) in several batches at 0° C. The resulting solution was stirred for 1 hr at room temperature. The reaction was then quenched by the addition of 3 L of Na₂S203 (sat.) at 0° C. The resulting solution was extracted with 3×1 L of dichloromethane and the organic layers combined and dried over anhydrous sodium sulfate. The solids were filtered out. The filtrate was concentrated. This resulted in 290 g (crude) of 3 as a white solid.

### Preparation of 4

[0493] Into a 5 L 3-necked round-bottom flask purged and maintained with an inert atmosphere of argon, was placed 3 (290 g, 603.4 mmol, 1.0 eq), EtOH (3 L). This was followed by the addition of NaBH₄ (22.8 g, 603.4 mmol, 1.0 eq), in portions at 0° C. The resulting solution was stirred for 1 hr at room temperature. The reaction was then quenched by the addition of 2000 mL of water/ice. The resulting solution was extracted with 3×1000 mL of dichloromethane and the organic layers combined and dried over anhydrous sodium sulfate. The solids were filtered out. The filtrate was concentrated. This resulted in 230 g (crude) of 4 as a white solid. LC-MS: m/z 485.10 [M+H]⁺. ¹H NMR (400 MHz, DMSO-d₆) δ 11.28 (d, J=2.2 Hz, 1H), 7.63-7.37 (m, 11H), 5.84 (dd, J=6.4, 4.9 Hz, 1H), 5.44 (dd, J=8.0, 2.2 Hz, 1H), 5.11 (t, J=6.0 Hz, 1H), 4.78 (t, J=5.2 Hz, 1H), 3.65 (dd, J=11.4, 5.7 Hz, 1H), 3.60-3.52 (m, 5H), 3.18 (d, J=5.2 Hz, 1H), 0.96 (s, 9H).

### Preparation of 5

[0494] Into a 5000-mL 3-necked round-bottom flask purged and maintained with an inert atmosphere of argon, was placed a solution of 4 (120 g, 1 eq) in DCM (1200 mL). This was followed by the addition of DIEA (95.03 g, 3 eq) at 0 degrees C. To this was added methanesulfonic anhydride (129 g, 3 eq), in portions at 0° C. The resulting solution was stirred for 1 hr at room temperature. The reaction was then quenched by the addition of 1000 mL of water/ice. The resulting solution was extracted with 3×500 mL of dichloromethane and the organic layers combined and dried over anhydrous magnesium sulfate. The solids were filtered out. The filtrate was concentrated. This resulted in 160 g (crude) of 5 as a yellow solid.; LC-MS (m/z) 641.05[M+H]⁺.

### Preparation of 6

[0495] Into a 1 L round-bottom flask, was placed a solution of 5 (160.00 g, 1.00 equiv) in THF (1600 mL), DBU (108 g, 2.8 equiv). The resulting solution was stirred for 1 hr at 30° C. The reaction was then quenched by the addition of 3000 mL of water/ice. The resulting solution was extracted with 3×500 mL of dichloromethane and the organic layers combined and dried over anhydrous sodium sulfate. The solids were filtered out. The filtrate was concentrated. This resulted in 150 g (crude) of 6 as brown oil.; LC-MS:(ES, m/z): 567.25[M+H]+

[0496] ¹HNMR (400 MHz, DMSO-d₆) δ 7.83 (d, J=7.4 Hz, 1H), 7.67-7.55 (m, 4H), 7.55-7.35 (m, 6H), 6.05 (dd, J=5.9, 1.7 Hz, 1H), 5.72 (d, J=7.4 Hz, 1H), 4.81 (dd, J=10.4, 5.8 Hz, 1H), 4.58-4.46 (m, 2H), 4.42 (p, J=5.2, 4.6 Hz, 1H), 4.33 (dd, J=10.6, 5.9 Hz, 1H), 3.79-3.70 (m, 2H), 3.23 (s, 3H), 0.98 (s, 9H).

### Preparation of 7

[0497] Into a 3000-mL round-bottom flask purged and maintained with an inert atmosphere of argon, was placed 6 (150.00 g, 201.950 mmol, 1. eq), DMF (1300.00 mL), potassium benzoate (44.00 g, 1.0 eq). The resulting solution was stirred for 1.5 hr at 80° C. The reaction was then quenched by the addition of 500 mL of water/ice. The resulting solution was extracted with 3×500 mL of dichloromethane The resulting mixture was washed with 3×1000 ml of H₂O. The resulting mixture was concentrated. The residue was applied onto a silica gel column with EA/PE (99:1). The collected fractions were combined and concentrated. This resulted in 40 g of 7 as yellow oil. LC-MS: m/z 571.20 [M+H]⁺; 1HNMR:(400 MHz, DMSO-d₆) δ 7.97-7.91 (m, 2H), 7.89 (d, J=7.4 Hz, 1H), 7.74-7.51 (m, 7H), 7.51-7.31 (m, 6H), 6.16 (m, 1H), 5.76 (d, J=7.4 Hz, 1H), 4.78 (m, 1H), 4.61 (m, 1H), 4.55-4.46 (m, 2H), 4.38 (m, 1H), 3.82 (d, J=5.0 Hz, 2H), 0.97 (s, 9H)

### Preparation of 8b

[0498] Into a 2-L round-bottom flask, was placed 7 (30.00 g, 1 eq), MeOH (1.20 L), p-toluenesulfonic acid (4.50 g, 0.5 eq). The resulting solution was stirred for 2 hr at 70° C. The reaction was then quenched by the addition of 3 L of NaHCO₃ (sat.). The pH value of the solution was adjusted to 7 with NaHCO₃ (sat.). The resulting solution was extracted with 3×1 L of ethyl acetate and the organic layers combined and dried over anhydrous sodium sulfate. The solids were filtered out. The filtrate was concentrated under vacuum. The crude product was purified by Flash-Prep-HPLC with the following conditions (IntelFlash-1): Column, silica gel; mobile phase, PE/EA=50/50 increasing to PE/EA=25/75 within 30; Detector, 254. This resulted in 11.5 g (3.1% yield in seven steps) 8b as a white solid. LC-MS: m/z 625.15[M+Na]⁺; ¹HNMR:(400 MHz, DMSO-d₆) δ 11.37 (d, J=2.3 Hz, 1H), 7.99-7.93 (m, 2H), 7.74-7.65 (m, 1H), 7.63-7.50 (m, 7H), 7.50-7.33 (m, 6H), 6.08 (t, J=6.0 Hz, 1H), 5.49 (m, 1H), 4.60 (m, 1H), 4.43 (m, 1H), 4.03-3.96 (m, 1H), 3.70 (d, J=5.3 Hz, 2H), 3.62-3.49 (m, 2H), 3.21 (s, 3H), 0.97 (s, 9H).

### Preparation of 9

[0499] Into a 2-L round-bottom flask, was placed 8b

[0500] (11.50 g). To the above 7M NH₃ (g) in MeOH (690.00 mL) was introduced in at 30° C. The resulting solution was stirred overnight at 30 degrees C. The resulting mixture was concentrated under vacuum. The crude product was purified by Flash with the following conditions (IntelFlash-1): Column, silica gel; mobile phase, PE/EA=60/40 increasing to PE/EA=1/99 within 60; Detector, 254. This resulted in 8.1 g (97% yield) of 9 as a white solid. LC-MS−: m/z 499.35 [M+H]⁺; ¹HNMR−: (300 MHz, DMSO-d₆) δ 11.31 (s, 1H), 7.64-7.50 (m, 5H), 7.48-7.35 (m, 6H), 6.02 (t, J=5.8 Hz, 1H), 5.45 (d, J=8.0 Hz, 1H), 4.80 (t, J=5.1 Hz, 1H), 3.58 (m, 7H), 3.27 (s, 3H), 0.96 (s, 9H).

### Preparation of 10

[0501] Into a 250-mL round-bottom flask, was placed 9 (8.10 g, 1 equiv), pyridine (80.0 mL), DMTr-Cl (7.10 g, 1.3eq). The flask was evacuated and flushed three times with Argon. The resulting solution was stirred for 2 hr at room temperature. The reaction was then quenched by the addition of 500 mL of NaHCO₃ (sat.). The resulting solution was extracted with 2×500 mL of ethyl acetate and the organic layers combined and dried over anhydrous sodium sulfate. The solids were filtered out. The filtrate was concentrated under vacuum. The crude product was purified by Flash with the following conditions (IntelFlash-1): Column, C18; mobile phase, ACN/H₂O=5/95 increasing to ACN/H₂O=95/5 within 30; Detector, 254. This resulted in 11.5 g (88% yield) of 10 as a white solid.; LC-MS: m/z 823.40 [M+Na]⁺; 1HNMR: (300 MHz, DMSO-d₆) δ 11.37 (s, 1H), 7.55-7.18 (m, 20H), 6.92-6.83 (m, 4H), 6.14 (t, J=5.9 Hz, 1H), 5.48 (d, J=8.0 Hz, 1H), 3.74 (m, 7H), 3.57 (m, 4H), 3.25 (m, 5H), 0.84 (s, 9H).

### Preparation of 11

[0502] Into a 1000-mL round-bottom flask, was placed 10 (11.5 g, 1.00 eq), THF (280.00 mL), TBAF (14.00 mL, 1.00 eq). The resulting solution was stirred for 3 hr at room temperature. The reaction was then quenched by the addition of 1 L of water. The resulting solution was extracted with 3×500 mL of ethyl acetate and the organic layers combined and dried over anhydrous sodium sulfate. The solids were filtered out. The filtrate was concentrated under vacuum. The crude product was purified by Flash with the following conditions (IntelFlash-1): Column, C18; mobile phase, ACN/H₂O=5/95 increasing to ACN/H₂O=95/5 within 30; Detector, 254. This resulted in 7.8 g (98% yield) of 11 as a white solid. LC-MS: m/z 561.20 [M−H]⁻; ¹HNMR: (300 MHz, DMSO-d₆) δ 11.32 (s, 1H), 7.66 (d, J=8.1 Hz, 1H), 7.52-7.39 (m, 2H), 7.39-7.20 (m, 7H), 6.96-6.83 (m, 4H), 6.17 (t, J=5.9 Hz, 1H), 5.63 (d, J=8.0 Hz, 1H), 4.63 (t, J=5.6 Hz, 1H), 3.90-3.46 (m, 9H), 3.26 (s, 5H), 3.19-2.98 (m, 2H).

### Preparation of 12

[0503] Into a 3-L round-bottom flask, was placed 11 (7.80 g, 1.00 eq), DCM (300.00 mL), NaHCO₃ (3.50 g, 3 eq). This was followed by the addition of Dess-Martin (7.06 g, 1.2 equiv) with stirring at 0° C., and the resulting solution was stirred for 20 min at 0° C. The resulting solution was stirred for 5 hr at room temperature. The reaction mixture was cooled to 0 degree c. with a water/ice bath. The reaction was then quenched by the addition of 500 mL of NaHCO₃:Na₂S₂O₃=1:1. The resulting solution was extracted with 3×500 mL of ethyl acetate and the organic layers combined and dried over anhydrous sodium sulfate. The solids were filtered out. The filtrate was concentrated under vacuum. The crude product was purified by Flash with the following conditions (IntelFlash-1): Column, C18; mobile phase, ACN/H₂O=5/95 increasing to ACN/H₂O=95/5 within 30; Detector, 254. This resulted in 5.8 g (75% yield) of 12 as a white solid. LC-MS: m/z 558.80 [M−H]⁻; ¹HNMR−:(300 MHz, DMSO-d₆) δ 11.35-11.22 (m, 1H), 9.43 (s, 1H), 7.75 (d, J=8.1 Hz, 1H), 7.49-7.19 (m, 8H), 6.90 (m, 5H), 6.00 (t, J=5.9 Hz, 1H), 5.66 (m, 1H), 4.40 (m, 1H), 3.75 (s, 7H), 3.70-3.56 (m, 3H), 3.29 (d, J=3.7 Hz, 3H).

### Preparation of 13

[0504] Into a 250-mL 3-round-bottom flask, was placed THF (150.00 mL), NaH (1.07 g, 60% w, 3.00 equiv). The flask was evacuated and flushed three times with Argon, and the reaction mixture was cooled to −78° C. This was followed by the addition of [[(bis[[(2,2-dimethylpropanoyl)oxy]methoxy]phosphoryl)methyl([(2,2-dimethylpropanoyl)oxy]methoxy)phosphoryl]oxy]methyl 2,2-dimethylpropanoate (14.60 g, 2.6 eq, in 60 m L THF) dropwise with stirring at −78° C. in 10 min, and the resulting solution was stirred for 30 min at −78° C. This was followed by the addition of 12 (5.00 g, 1.00 eq, in 50 mL THF) dropwise with stirring at −78° C. in 10 min. The resulting solution was stirred for 4 hr at room temperature. The reaction was then quenched by the addition of 400 mL of NH₄Cl(sat.). The resulting solution was extracted with 3×400 mL of ethyl acetate and the organic layers combined and dried over anhydrous sodium sulfate. The solids were filtered out. The filtrate was concentrated under vacuum. The crude product was purified by Flash with the following conditions (IntelFlash-1): Column, C18; mobile phase, ACN/H₂O=5/95 increasing to ACN/H₂O=95/5 within 30; Detector, 254. This resulted in 7.2 g (crude) of 13 as a solid. LC-MS: m/z: 865.10 [M−H].⁻

### Preparation of 14

[0505] Into a 500-mL round-bottom flask, was placed 13

[0506] (6.00 g), H₂O (30.00 mL), AcOH (120.00 mL). The resulting solution was stirred for 1 hr at 50 degrees C. The reaction mixture was cooled to 0 degree c. with a water/ice bath. The reaction was then quenched by the addition of 2 L of NaHCO₃ (sat.). The pH value of the solution was adjusted to 7 with NaHCO₃ (sat.). The resulting solution was extracted with 3×500 mL of ethyl acetate and the organic layers combined and dried over anhydrous sodium sulfate. The solids were filtered out. The filtrate was concentrated under vacuum. The crude product was purified by Flash with the following conditions (IntelFlash-1): Column, C18; mobile phase, ACN/H₂O=5/95 increasing to ACN/H₂O=95/5 within 30; Detector, 254. This resulted in 2.6 g (44% yield in two steps) of 14 as yellow oil. LC-MS: m/z 587.25 [M+Na]⁺; ¹HNMR:(300 MHz, DMSO-d₆) δ 11.31 (s, 1H), 7.73 (d, J=8.1 Hz, 1H), 6.63 (ddd, J=24.2, 17.2, 4.2 Hz, 1H), 6.14-5.96 (m, 2H), 5.65-5.48 (m, 5H), 5.09 (t, J=5.6 Hz, 1H), 4.17 (s, 1H), 3.65 (d, J=6.1 Hz, 2H), 3.52 (m, 2H), 3.27 (s, 3H), 1.15 (d, J=3.7 Hz, 18H); ³¹PNMR−:(162 MHz, DMSO-d₆) δ 17.96.

### Preparation of 15

[0507] Into a 250-mL 3-necked round-bottom flask, was placed DCM (60.00 mL), DCI (351.00 mg, 1.2 eq), 3-[[bis(diisopropylamino)phosphanyl]oxy]propanenitrile (971.00 mg, 1.3 eq), 4A MS. The flask was evacuated and flushed three times with Argon, and the reaction mixture was cooled to 0° C. This was followed by the addition of 14 (1.40 g, 1.00 eq, in 30 mL DCM) dropwise with stirring at 0° C. in 30 second. The resulting solution was stirred for 1 hr at room temperature. The reaction was then quenched by the addition of 50 mL of water. The resulting solution was extracted with 3×50 mL of ethyl acetate and the organic layers combined. The resulting mixture was washed with 3×50 ml of NaCl(sat.). The mixture was dried over anhydrous magnesium sulfate. The solids were filtered out. The filtrate was concentrated under vacuum. The crude product was purified by Prep-Archiral-SFC with the following conditions: Column: Ultimate Diol, 2*25 cm, 5 ₁¹Ìm; Mobile Phase A: CO₂, Mobile Phase B: ACN(0.2% TEA); Flow rate: 50 mL/min; Gradient: isocratic 30% B; Column Temperature (20° C.): 35; Back Pressure (bar): 100; Wave Length: 254 nm; RT1 (min): 2.58; Sample Solvent:MeOH--HPLC; Injection Volume: 1 mL; Number Of Runs: 4. This resulted in 1.31 g (65% yield) 15 as yellow oil. LC-MS: m/z 763.40 [M−H]⁻; 1HNMR−: (300 MHz, Acetonitrile-d₃) δ 9.05 (s, 1H), 7.51 (d, J=8.1 Hz, 1H), 6.64 (dddd, J=23.8, 17.1, 4.8, 1.9 Hz, 1H), 6.23-5.92 (m, 2H), 5.70-5.51 (m, 5H), 4.38 (d, J=4.9 Hz, 1H), 3.96-3.56 (m, 8H), 3.35 (s, 3H), 2.70 (m, 2H), 1.33-1.14 (m, 30H); 31 PNMR−:(Acetonitrile-d₃) δ 148.75, 148.53, 16.68.

### Example 42

[chemical structure]

### Preparation of 1

[0508] A solution of 7 from Example 41 (23 g, 40.300 mmol, 1.00 equiv) and p-TsOH (9.02 g, 52.390 mmol, 1.3 equiv) in MeOH (1000 mL) was stirred for overnight at 40° C. under argon atmosphere. The reaction was quenched with sat. sodium bicarbonate (aq.) at 0 degrees C. The resulting mixture was extracted with EtOAc (2×500 mL). The combined organic layers were washed with water (2×500 mL), dried over anhydrous MgSO₄. After filtration, the filtrate was concentrated under reduced pressure. The residue was purified by reverse flash chromatography with the following conditions: column, C18 silica gel; mobile phase, ACN in water, 10% to 90% gradient in 30 min; detector, UV 254 nm. This resulted in 1 (5.3 g, 36.%) as a colorless oil.; LC-MS:(ES, m/z): 365 [M+H]⁺; ¹H-NMR: (300 MHz, DMSO-d₆) δ 11.20 (s, 1H), 8.09-7.78 (m, 2H), 7.63-7.50 (m, 2H), 7.51-7.35 (m, 2H), 5.95 (t, J=5.9 Hz, 1H), 5.51 (d, J=8.1 Hz, 1H), 4.73 (t, J=5.7 Hz, 1H), 4.41 (dd, J=11.9, 3.3 Hz, 1H), 4.17 (dd, J=11.9, 6.3 Hz, 1H), 3.69 (dq, J=10.1, 6.8, 6.3 Hz, 1H), 3.48-3.40 (m, 2H), 3.39-3.29 (m, 2H), 3.07 (s, 3H).

### Preparation of 2

[0509] Into a 250-mL 3-necked round-bottom flask, was placed 1 (7.00 g, 19.212 mmol, 1.00 equiv), ACN (60.00 mL), H₂O (60.00 mL), TEMPO (0.72 g, 4.611 mmol, 0.24 equiv), BAIB (13.61 g, 42.267 mmol, 2.20 equiv). The resulting solution was stirred for 1 overnight at 30° C. The reaction was then quenched by the addition of 200 mL of water/ice. The resulting solution was extracted with 2×200 mL of ethyl acetate, The resulting mixture was washed with 2×200 ml of water. The mixture was dried over anhydrous sodium sulfate and concentrated. The crude product was purified by Flash-Prep-HPLC with the following conditions (IntelFlash-1): Column, C18 silica gel; mobile phase, ACN/H₂O=5/95 increasing to ACN/H₂O=95/5 within 30 min; Detector, UV 254 nm; product was obtained. This resulted in 5 g (68.8%) of 2 as a solid. LC-MS:(ES, m/z): 379 [M+H]⁺; ¹H NMR (300 MHz, DMSO-d₆) δ 13.24 (s, 1H), 11.31 (d, J=2.2 Hz, 1H), 8.18-7.83 (m, 2H), 7.81-7.63 (m, 2H), 7.61-7.42 (m, 2H), 6.01 (t, J=6.0 Hz, 1H), 5.61 (dd, J=8.0, 2.2 Hz, 1H), 4.72-4.40 (m, 3H), 3.73-3.55 (m, 2H), 3.22 (s, 3H).

### Preparation of 3

[0510] Into a 250-mL round-bottom flask, was placed 2 (4.5 g, 11.894 mmol, 1.00 equiv), DMF (90.00 mL,), Pb(OAc)₄ (15.82 g, 35.679 mmol, 3.00 equiv). The resulting solution was stirred overnight at 30° C. The reaction was then quenched by the addition of 200 mL of water/ice. The resulting solution was extracted with 2×200 mL of ethyl acetate The resulting mixture was washed with 2×200 ml of water. The mixture was dried over anhydrous sodium sulfate and concentrated. The crude product was purified by Flash with the following conditions (IntelFlash-1): Column, C18 silica gel; mobile phase, ACN/H₂O=5/95 increasing to ACN/H₂O=95/5 within 30 min; Detector, UV 254 nm; product was obtained. This resulted in 4 g 3 as oil; LC-MS:(ES, m/z): 415 [M+Na]⁺; ¹H NMR (300 MHz, DMSO-d₆) δ 11.39 (s, 1H), 7.93 (dd, J=24.2, 7.6 Hz, 2H), 7.75-7.46 (m, 4H), 6.35-6.03 (m, 2H), 5.71-5.47 (m, 1H), 4.60-4.14 (m, 2H), 3.88-3.54 (m, 2H), 3.26 (d, J=6.7 Hz, 3H), 2.03 (d, J=49.7 Hz, 3H).

### Preparation of 4

[0511] Into a 250-mL 3-necked round-bottom flask purged and maintained with an inert atmosphere of argon, was placed 3 (4.00 g, 10.195 mmol, 1.00 eq), DCM (80.00 mL), dimethyl hydroxymethylphosphonate (22.85 g, 163.114 mmol, 16.00 eq), BF₃·Et₂O (28.94 g, 203.91 mmol, 20 eq). The resulting solution was stirred overnight at room temperature. The reaction was then quenched by the addition of 500 mL of water/ice. The resulting solution was extracted with 2×500 mL of ethyl acetate The resulting mixture was washed with 2×500 ml of water. The mixture was dried over anhydrous sodium sulfate and concentrated. The residue was applied onto a silica gel column with dichloromethane/methanol (20/1). This resulted in 2 g (41.5%) of 4 as a solid.

[0512] LC-MS:(ES, m/z): 490 [M+H₂O]+; 1H-NMR (300 MHz, DMSO-d₆) δ 11.39 (d, J=5.4 Hz, 1H), 7.96 (dt, J=11.5, 9.3 Hz, 2H), 7.81-7.40 (m, 4H), 6.29-5.98 (m, 1H), 5.56 (dd, J=12.2, 8.1 Hz, 1H), 5.28-4.99 (m, 1H), 4.29 (dp, J=25.1, 5.9 Hz, 2H), 4.16-3.84 (m, 2H), 3.75-3.53 (m, 7H), 3.28 (d, J=12.5 Hz, 2H).

### Preparation of 5

[0513] Into a 100-mL round-bottom flask, was placed 4 (2.00 g, 4.234 mmol, 1.00 equiv), 7M NH₃ (g) in THF (20.00 mL) was added. The resulting solution was stirred overnight at 25° C. The resulting mixture was concentrated under vacuum. The crude product was purified by prep-sfc Column: Lux Sum i-Cellulose-5, 3*25 cm, 5 m; Mobile Phase A: CO₂, Mobile Phase B:MeOH(0.1% 2M NH₃-MEOH); Flow rate: 70 mL/min; Gradient: isocratic 50% B; Column Temperature (25° C.): 35; Back Pressure (bar): 100; Wave Length: 220 nm; RT1 (min): 3.75; RT2 (min): 4.92; Sample Solvent:MeOH:DCM=1:1; Injection Volume: 1 mL; Number Of Runs: 15, This resulted in 330 mg (21.2%) of 5 as a solid. 1H-NMR−: (300 MHz, DMSO-d₆) δ 11.14 (s, 1H), 7.63 (d, J=8.1 Hz, 1H), 6.06 (t, J=5.9 Hz, 1H), 5.64 (d, J=8.0 Hz, 1H), 4.89 (s, 1H), 4.63 (t, J=5.3 Hz, 1H), 3.98 (d, J=9.8 Hz, 2H), 3.70 (dd, J=10.7, 1.2 Hz, 8H), 3.63 (dd, J=6.0, 3.2 Hz, 1H), 3.29 (s, 3H).

### Preparation of 6

[0514] To a stirred solution of 3-{[bis(diisopropylamino)phosphanyl]oxy}propanenitrile (324.10 mg, 1.075 mmol, 1.2 equiv) and 1H-imidazole-4,5-dicarbonitrile (126.99 mg, 1.075 mmol, 1.2 equiv) in DCM (10 mL) was added 5 (330 mg, 0.9 mmol, 1.00 eq) dropwise at 25° C. under argon atmosphere. The resulting mixture was stirred for 30 min at 25 degrees C. The reaction was quenched with water/ice. The resulting mixture was extracted with EtOAc (2×10 mL). The combined organic layers were washed with water (2×10 mL), dried over anhydrous MgSO₄. After filtration, the filtrate was concentrated under reduced pressure. Column: Ultimate Diol, 2*25 cm, 5 m; Mobile Phase A: CO₂, Mobile Phase B: ACN; Flow rate: 50 mL/min; Gradient: isocratic 30% B; Column Temperature (25° C.): 35; Back Pressure (bar): 100; Wave Length: 254 nm; RT1 (min): 3.95; Sample Solvent: ACN; Injection Volume: 1 mL; Number Of Runs: 10, This resulted in 6 (349 mg, 68.4%) as a light yellow oil. LC-MS:(ES, m/z): 567.25 [M+H]⁺; 1H-NMR: (300 MHz, DMSO-d₆) δ 11.38 (s, 1H), 7.64 (dd, J=8.0, 1.3 Hz, 1H), 6.09 (dt, J=5.8, 3.4 Hz, 1H), 5.65 (dd, J=8.0, 3.2 Hz, 1H), 4.83 (q, J=5.5 Hz, 1H), 4.03 (dt, J=9.7, 2.2 Hz, 2H), 3.83-3.40 (m, 14H), 3.30 (s, 3H), 2.77 (t, J=5.9 Hz, 2H), 1.12 (ddd, J=9.2, 6.7, 1.7 Hz, 12H); ³¹P NMR (DMSO-d₆) δ 148.0, 147.6, 23.1

### Example 43

[chemical structure]

### Preparation of 1

[0515] Into a 100-mL round-bottom flask, was placed 2 4 from Example 42 (2.00 g, 4.234 mmol, 1.00 equiv), 7M NH₃ (g) in THF (20.00 mL) was added. The resulting solution was stirred overnight at 25° C. The resulting mixture was concentrated under vacuum. The crude product was purified by prep-sfc Column: Lux Sum i-Cellulose-5, 3*25 cm, 5 m; Mobile Phase A: CO₂, Mobile Phase B:MeOH (0.1% 2M NH₃-MeOH); Flow rate: 70 mL/min; Gradient: isocratic 50% B; Column Temperature (° C.): 35; Back Pressure (bar): 100; Wave Length: 220 nm; RT1 (min): 3.75; RT2 (min): 4.92; Sample Solvent:MeOH:DCM=1:1; Injection Volume: 1 mL; Number Of Runs: 15, This resulted in 320 mg (22.8%) of 1 as a solid. 1H-NMR− -14-3-40: (300 MHz, DMSO-d₆) δ 11.11 (s, 1H), 7.70 (d, J=8.0 Hz, 1H), 6.03 (t, J=6.1 Hz, 1H), 5.64 (d, J=8.0 Hz, 1H), 4.97 (s, 1H), 4.76 (t, J=5.3 Hz, 1H), 4.07-3.85 (m, 1H), 3.79 (dd, J=13.9, 9.3 Hz, 1H), 3.73-3.55 (m, 9H), 3.41 (d, J=5.0 Hz, 2H), 3.28 (s, 3H).

### Preparation of 2

[0516] To a stirred solution/mixture of 3-{[bis(diisopropylamino)phosphanyl]oxy}propanenitrile (517.58 mg, 1.717 mmol, 1.2 equiv) and 1H-imidazole-4,5-dicarbonitrile (202.79 mg, 1.717 mmol, 1.2 equiv) in DCM was added 1 (527 mg, 1.431 mmol, 1.00 eq.) dropwise at 25° C. under argon atmosphere. The resulting mixture was stirred for 30 min at 25° C. The reaction was quenched with Water/Ice. The resulting mixture was extracted with EtOAc (2×10 mL). The combined organic layers were washed with water (2×10 mL), dried over anhydrous MgSO₄. After filtration, the filtrate was concentrated under reduced pressure. Column: Ultimate Diol, 2*25 cm, 5 m; Mobile Phase A: CO2, Mobile Phase B: ACN(0.1% DEA)--HPLC--merk; Flow rate: 50 mL/min; Gradient: isocratic 30% B; Column Temperature (° C.): 35; Back Pressure (bar): 100; Wave Length: 254 nm; RT1 (min): 4.57; Sample Solvent: ACN; Injection Volume: 1 mL; Number Of Runs: 10 to afford 2 (264.8 mg, 31.7%) as a light yellow oil. LC-MS:(ES, m/z): 567.25 [M−H]⁻; 1H NMR (300 MHz, DMSO-d₆) δ 13.24 (s, 1H), 11.31 (d, J=2.2 Hz, 1H), 8.18-7.83 (m, 2H), 7.81-7.63 (m, 2H), 7.61-7.42 (m, 2H), 6.01 (t, J=6.0 Hz, 1H), 5.61 (dd, J=8.0, 2.2 Hz, 1H), 4.72-4.40 (m, 3H), 3.73-3.55 (m, 2H), 3.22 (s, 3H); ³¹P NMR (DMSO-d₆) δ 148.01, 147.67, 22.8.

### Example 44

[chemical structure]

### Preparation of 1

[0517] To a stirred mixture of ascorbic acid (100.00 g, 567.78 mmol, 1.00 equiv) and CaCO₃ (113.0 g, 1129.02 mmol, 2 equiv) in H₂O (1.00 L) was added H₂O₂ (30%)(236.0 g, 6938.3 mmol, 12.22 equiv) dropwise at 0° C. The resulting mixture was stirred overnight at room temperature. The mixture was treat with charcoal and heat to 70 degrees until the no more peroxide was detected. The resulting mixture was filtered, the filter cake was washed with warm water (3×300 mL). The filtrate was concentrated under reduced pressure. The solid was diluted with MeOH (200 mL) and the mixture was stirred for 5 h. The resulting mixture was filtered, the filter cake was washed with MeOH (3×80 mL). The filtrate was concentrated under reduced pressure to afford L-threonate (86 g, 96.6%) as a white crude solid. 1H-NMR−: (300 MHz, Deuterium Oxide) δ 4.02 (dd, J=4.6, 2.4 Hz, 1H), 3.91 (ddt, J=7.6, 5.3, 2.2 Hz, 1H), 3.78-3.44 (m, 2H).

### Preparation of 2

[0518] Into a 5 L round-bottom flask were added L-threonate (70.00 g, 518.150 mmol, 1.00 equiv) and H₂O (2 L) at room temperature. The residue was acidified to pH=1 with Dowex 50wX8, H(+)-Form). The resulting mixture was stirred for 1 h at 70° C. The resulting mixture was filtered, the filter cake was washed with water (2×1 L). The filtrate was concentrated under reduced pressure. The solid was co-evaporated with (2×2 L). Then the solid was diluted with ACN (700.00 mL), and the TsOH(5.35 g, 31.089 mmol, 0.06 equiv) was added. The resulting mixture was stirred for 1 h at 80 degrees C. under air atmosphere. The resulting mixture was filtered, the filter cake was washed with ACN (2×500 mL). The filtrate was concentrated under reduced pressure to 2 (70 g, crude) as a yellow oil.

### Preparation of 3

[0519] To a stirred solution of (2 (70.0 g crude, 593.2 mmol, 1.00 eq.) in pyridine (280.00 mL) was added benzoyl chloride (207.62 g, 1.483 mol, 2.5 equiv) dropwise at 0° C. under argon atmosphere. The resulting mixture was stirred for 1 h at room temperature under argon atmosphere. The reaction was quenched by the addition of sat. NaHCO₃ (aq.) (500 mL) at 0 degrees C. The resulting mixture was extracted with CH₂Cl₂ (3×500 mL). The combined organic layers were washed with brine (2×300 mL), dried over anhydrous Na₂SO₄. After filtration, the filtrate was concentrated under reduced pressure. The residue was purified by silica gel column chromatography, eluted with PE/EtOAc to afford (3 (80 g, 41.4%) as an off-white solid. LC-MS: (ES, m/z): 327 [M+H]+; 1H-NMR: (300 MHz, CDCl₃) δ 8.18-8.04 (m, 4H), 7.68-7.61 (m, 2H), 7.50 (tt, J=7.1, 1.4 Hz, 4H), 5.96-5.57 (m, 2H), 5.11-5.00 (m, 1H), 4.45-4.35 (m, 1H).

### Preparation of 4

[0520] To a stirred solution of 3 (125 g, 383.078 mmol, 1.00 eq) in THF(1.50 L) was added DIBAL-H (1M)(600 mL, 2 eq) dropwise at −78° C. under argon atmosphere. The resulting mixture was stirred for 1 h at −78 degrees C. under argon atmosphere. Desired product was detected by LCMS. The reaction was quenched with MeOH at 0° C. The resulting mixture was diluted with EtOAc (600 mL). Then the resulting mixture was filtered, the filter cake was washed with EtOAc (3×800 mL). The filtrate was concentrated under reduced pressure. This resulted in 4 (73 g, crude) as a colorless solid. LC-MS: (ES, m/z): 392 [M+Na+ACN]+; 1H-NMR−: (400 MHz, Chloroform-d) δ 8.22-7.99 (m, 8H), 7.62 (dtd, J=7.4, 4.4, 2.2 Hz, 4H), 7.48 (td, J=7.8, 2.4 Hz, 8H), 5.87 (d, J=4.3 Hz, 1H), 5.77 (dt, J=6.6, 3.6 Hz, 1H), 5.56 (d, J=4.9 Hz, 2H), 5.50 (t, J=4.3 Hz, 1H), 4.73 (s, 1H), 4.63 (ddd, J=10.4, 7.9, 6.1 Hz, 2H), 4.28 (dd, J=10.3, 3.8 Hz, 1H), 3.99 (dd, J=10.6, 3.2 Hz, 1H).

### Preparation of 5

[0521] To a stirred solution of (4 (73.00 g, 222.344 mmol, 1.00 equiv) and DMAP (271.63 mg, 2.223 mmol, 0.01 equiv) and pyridine(365.00 mL) in DCM(365.00 mL) were added Ac₂O(24.97 g, 244.6 mmol, 1.1 equiv) dropwise at 0 degrees C. under argon atmosphere. The resulting mixture was stirred for 1 h at room temperature under argon atmosphere. The reaction was quenched with sat. NaHCO₃ (aq.) at 0 degrees C. The resulting mixture was extracted with CH₂Cl₂ (3×500 mL). The combined organic layers were washed with sat. CuSO₄ (3×200 mL), dried over anhydrous Na₂SO₄. After filtration, the filtrate was concentrated under reduced pressure. The residue was purified by silica gel column chromatography, eluted with PE/EtOAc to afford 5 (60 g, 73%) as a colorless oil. LC-MS: (ES, m/z): 434 [M+Na+ACN]⁺; 1H-NMR: (400 MHz, Chloroform-d) δ 8.17-8.02 (m, 8H), 7.63 (tddd, J=7.9, 6.6, 3.2, 1.6 Hz, 4H), 7.57-7.44 (m, 8H), 6.66 (d, J=4.5 Hz, 1H), 6.40 (s, 1H), 5.83-5.53 (m, 4H), 4.67 (ddd, J=23.4, 10.5, 6.2 Hz, 2H), 4.24 (dd, J=10.5, 3.8 Hz, 1H), 4.19-4.01 (m, 1H), 2.18 (s, 3H), 2.06 (d, J=3.2 Hz, 3H).

### Preparation of 6

[0522] To a stirred mixture of 5 (50.00 g, 135.005 mmol, 1.00 eq) and uracil (15.13 g, 135.005 mmol, 1 eq) in can (500.00 mL) was added BSA (54.81 g, 270.010 mmol, 2 eq) in portions at room temperature under air atmosphere. The resulting mixture was stirred for 1 h at 60° C. under argon atmosphere. After that, the TMSOTf (90.02 g, 405.0 mmol, 3 eq) was added dropwise at 0° C. The resulting mixture was stirred for 2 h at 60° C. under argon atmosphere. The mixture was neutralized to pH=7 with saturated NaHCO₃ (aq.) at 0° C. The resulting mixture was extracted with CH₂Cl₂ (3×400 mL). The combined organic layers were washed with brine (2×400 mL), dried over anhydrous Na₂SO₄. After filtration, the filtrate was concentrated under reduced pressure. The residue was purified by silica gel column chromatography, eluted with PE/EtOAc (1:1) to afford 6 (43 g, 75.4%) as a white solid. LC-MS: (ES, m/z): [M+H]⁺; 423 464 [M+H+ACN]⁺; 1H-NMR−: (300 MHz, Chloroform-d) δ 9.08-8.89 (m, 1H), 8.17-7.94 (m, 4H), 7.70-7.43 (m, 7H), 6.19 (d, J=1.9 Hz, 1H), 5.84-5.71 (m, 2H), 5.62 (td, J=3.3, 2.8, 1.4 Hz, 1H), 4.59-4.44 (m, 2H), 4.14 (q, J=7.2 Hz, 1H).

### Preparation of 7

[0523] A solution of 6 (52.00 g, 123.108 mmol, 1 eq) was dissolved in 642 ml of MeOH/H₂O/TEA (5:1:1) at room temperature and heat to reflux until no more starting material was detected (2˜3 h). The resulting mixture was concentrated under reduced pressure. The residue was dissolved in EtOAc (600 mL) and the organic layer was extracted with water (5×800 mL). The aqueous layer was concentrated under vacuum to afford 7 (21 g, crude) as a off-white solid. The crude product was used in the next step directly without further purification. LC-MS−: (ES, m/z): 213 [M−H]⁻; 1 H-NMR: (300 MHz, DMSO-d₆) δ 11.26 (s, 1H), 7.68 (d, J=8.1 Hz, 1H), 5.75 (s, 1H), 5.65 (d, J=1.2 Hz, 1H), 5.59 (d, J=8.1 Hz, 1H), 5.39 (s, 1H), 4.10-3.97 (m, 4H).

### Preparation of 8

[0524] To a stirred mixture of 7 (16.00 g, 74.705 mmol, 1.00 equiv) and DBU (22.75 g, 149.409 mmol, 2 equiv) in DCM (80.00 mL) and DMF (200.00 mL) was added DMTr-Cl (7.88 g, 25.680 mmol, 1.1 equiv) dropwise at room temperature under argon atmosphere. The resulting mixture was stirred for 2 h at room temperature under argon atmosphere. The reaction was quenched by the addition of sat. NaHCO₃ (aq.) (100 mL) at 0 degrees C. The resulting mixture was extracted with EtOAc (3×60 mL). The combined organic layers were washed with brine (2×50 mL), dried over anhydrous Na₂SO₄. After filtration, the filtrate was concentrated under reduced pressure. The residue was purified by silica gel column chromatography, eluted with PE (0.5% TEA)/EtOAc (2:3) to afford 8 (25 g, 64.8%) as a off-white solid.; LC-MS: (ES, m/z): 515 [M−H]⁻; ¹H-NMR: (400 MHz, DMSO-d₆) δ 11.33 (s, 1H), 7.57 (d, J=8.1 Hz, 1H), 7.45-7.13 (m, 9H), 6.86 (t, J=8.5 Hz, 4H), 5.94 (d, J=1.7 Hz, 1H), 5.58 (d, J=8.1 Hz, 1H), 5.15 (d, J=2.6 Hz, 1H), 3.97-3.79 (m, 3H), 3.73 (d, J=2.3 Hz, 6H), 3.33 (d, J=2.5 Hz, 1H).

### Preparation of 9

[0525] To a stirred solution of 8 (6.00 g, 11.616 mmol, 1.00 eq) in THF (240.00 mL) was added NaH (60%) (1.40 g, 35.003 mmol, 3 eq) dropwise at 0° C. under argon atmosphere. The resulting mixture was stirred for 30 min at 0 degrees C. under argon atmosphere. Then the dimethyl ethenylphosphonate (15.81 g, 116.2 mmol, 10.00 eq) was added and the resulting mixture was stirred overnight at room temperature under argon atmosphere. The reaction was quenched with sat. NH₄C1 (aq.) at room temperature. The resulting mixture was extracted with EtOAc (3×100 mL). The combined organic layers were washed with brine (3×80 mL), dried over anhydrous Na₂SO₄. After filtration, the filtrate was concentrated under reduced pressure. The residue was purified by reverse flash chromatography with the following conditions: column, C18 mobile phase, ACN in water, 5% to 95% gradient in 30 min; detector, UV 254 nm to afford 9 (3.65 g, 48.15%) as a white solid.

[0526] LC-MS: (ES, m/z): 675 [M+Na]+; 1H-NMR−: (300 MHz, DMSO-d₆) δ 11.39 (s, 1H), 7.44-7.36 (m, 3H), 7.34-7.21 (m, 7H), 6.93-6.83 (m, 4H), 6.08 (d, J=2.0 Hz, 1H), 5.55 (d, J=8.1 Hz, 1H), 4.08 (d, J=11.0 Hz, 1H), 3.92 (d, J=2.0 Hz, 1H), 3.82-3.71 (m, 7H), 3.57 (dd, J=10.9, 3.6 Hz, 6H), 3.30-3.23 (m, 1H), 3.06-2.86 (m, 2H), 1.96 (dt, J=18.1, 7.1 Hz, 2H).

### Preparation of 10

[0527] A solution of 9 (2.80 g, 4.3 mmol, 1.00 equiv) in AcOH (12.00 mL) and H₂O (3.00 mL) was stirred for overnight at room temperature under air atmosphere. The reaction was quenched with sat. NaHCO₃ (aq.) at 0 degrees C. The resulting mixture was washed with 3×20 mL of CH₂Cl₂. The product in the water layer. The water layer was concentrated under reduced pressure. The product was purified by Prep-SFC with the following conditions (Prep SFC80-2): Column, Green Sep Basic, 3*15 cm; mobile phase, CO₂ (70%) and IPA (0.5% 2M NH₃-MeOH)(30%); Detector, UV 254 nm; product was obtained. This resulted in 870 mg (57.89%) of 10 as a white solid. LC-MS: (ES, m/z): 351 [M+Na]+; 1H-NMR−: (300 MHz, DMSO-d₆) δ 11.28 (s, 1H), 7.56 (d, J=8.1 Hz, 1H), 5.86 (d, J=4.4 Hz, 1H), 5.65 (d, J=1.6 Hz, 1H), 5.56 (d, J=8.1 Hz, 1H), 4.17 (d, J=10.1 Hz, 1H), 4.10 (d, J=4.3 Hz, 1H), 4.00 (dd, J=10.1, 3.9 Hz, 1H), 3.87 (dt, J=4.1, 1.3 Hz, 1H), 3.72-3.49 (m, 8H), 2.08 (dd, J=7.1, 2.8 Hz, 1H), 2.05-1.96 (m, 1H).

### Preparation of 11

[0528] Into a 250 mL 3-necked round-bottom flask were added Molecularsieve and ACN (30.00 mL) at room temperature. The resulting mixture was stirred for 10 min at room temperature under argon atmosphere. Then to the stirred solution were added 3-[[bis(diisopropylamino)phosphanyl]oxy]propanenitrile (1058.46 mg, 3.512 mmol, 1.5 equiv) and DCI (359.12 mg, 3.043 mmol, 1.30 equiv). Then the dimethyl 10 (820.00 mg, 2.341 mmol, 1.00 equiv) in 30 mL ACN was added dropwise at room temperature under argon atmosphere. The resulting mixture was stirred for 1 h at room temperature under argon atmosphere. The resulting mixture was diluted with CH2Cl2 (60 mL). The combined organic layers were washed with water (3×40 mL) after filtration, dried over anhydrous MgSO4. After filtration, the filtrate was concentrated un der reduced pressure. The residue was purified by Prep-TLC (0.5% TEA in PE/10% EtOH in EtOAc 1:9) to afford 11 (800 mg, 62.1%) as a colorless oil. LC-MS: (ES, m/z): 549 [M−H]⁻; 1H-NMR: (300 MHz, DMSO-d₆) δ 11.34 (s, 1H), 7.61 (dd, J=8.1, 1.7 Hz, 1H), 5.80 (dd, J=15.0, 1.8 Hz, 1H), 5.60 (d, J=8.1 Hz, 1H), 4.48-4.23 (m, 2H), 4.17-3.98 (m, 2H), 3.88-3.73 (m, 2H), 3.72-3.51 (m, 10H), 2.79 (q, J=5.9 Hz, 2H), 2.07 (dtt, J=17.9, 7.1, 3.2 Hz, 2H), 1.15 (ddd, J=6.3, 3.8, 2.1 Hz, 12H); ³¹P NMR (DMSO-d₆) δ 149.71, 149.35, 30.85, 30.75

### Example 45

[chemical structure]

[0529] Preparation of 2: (J. Chem. Soc., Perkin Trans. 1, 1992, 1943-1952) To a solution of 1 (150.0 g, 1.0 mol) in DMF (2.0 L) was added 2,2-dimethoxypropane (312.0 g, 3.0 mol) and p-TsOH (1.7 g, 10.0 mmol), then the reaction mixture was stirred at r.t. for 4 h, after the reaction, the solvent was concentrated to give the crude products which was used directly to next step.

[0530] Preparation of 3: (J. Chem. Soc., Perkin Trans. 1, 1992, 1943-1952) To a solution of 2 (190.0 g, 1.0 mol) in pyridine (2.0 L) was added BzCl (560.0 g, 4.0 mol) then the reaction mixture was stirred at r.t. for 2 h, after the reaction, the reaction mixture was poured into the ice water, EA was added for extraction, and the organic phase was washed with brine, dried over Na₂SO₄ and concentrated to give the crude product which was purified by silica gel column (EA:PE=1:5 to 1:1) to give 3 (350.0 g, 87.9% yield), ESI-LCMS: m/z=421.2 [M+Na]⁺.

[0531] Preparation of 4: (J. Chem. Soc., Perkin Trans. 1, 1992, 1943-1952) to a solution of 3 (240.0 g, 815.5 mmol) in MeCN (3.0 L) was added N-(2-oxo-1H-pyrimidin-4-yl) benzamide (193.0 g, 897.0 mmol) and BSA (496.6 g, 2.4 mol). then the reaction mixture was stirred at 50° C. for 30 min, then the reaction mixture was cooled to 0° C., and the TMSOTf (271.5 g, 1.2 mol) was added into the mixture at 0° C., then the reaction mixture was stirred at 70° C. for 2 h, after the reaction, the solvent was concentrated to give an oil, then the oil was poured into the solution of NaHCO₃ maintaining the mixture was slightly alkaline, EA was added for extraction, and the organic phase was washed with brine, dried over Na₂SO₄ and concentrated to give the crude product which was purified by silica gel column (EA:PE=1:3 to 1:1) to give 4 (180.0 g, 44.9% yield). ESI-LCMS: m/z=491.2 [M+H]⁺; ¹H NMR (400 MHz, DMSO-d₆) δ 11.19 (s, 1H), 8.20 (d, J=7.6 Hz, 1H), 8.01-7.84 (m, 4H), 7.73-7.57 (m, 2H), 7.50 (dt, J=10.4, 7.7 Hz, 4H), 7.40 (d, J=7.4 Hz, 1H), 6.03 (d, J=9.4 Hz, 1H), 5.33 (dd, J=9.4, 7.3 Hz, 1H), 4.66 (dd, J=7.3, 5.3 Hz, 1H), 4.45-4.35 (m, 2H), 4.22 (dd, J=13.7, 2.5 Hz, 1H), 1.58 (s, 3H), 1.34 (s, 3H).

[0532] Preparation of 5: To a solution of 4 (78.0 g, 158.7 mmol) in pyridine (800.0 mL) was added a solution of NaOH (6.3 g, 158.7 mmol) in a mixture solvent of H₂O and MeOH (4:1, 2N), Then the reaction mixture was stirred at 0° C. for 20 min, LC-MS and TLC show that the raw material was disappeared, then the mixture was pour into a solution of NH₄Cl, EA was added for extraction, and the organic phase was washed with brine, dried over Na₂SO₄ and concentrated to give the crude product, which was purified by silica gel column (DCM:MeOH=30:1 to 10:1) to give 5 (56.0 g, 91.0% yield). ESI-LCMS: m/z=388.1 [M+H]⁺; ¹H NMR (400 MHz, DMSO-d₆) δ 11.29 (s, 1H), 8.16 (d, J=7.6 Hz, 1H), 8.08-7.99 (m, 2H), 7.67-7.60 (m, 1H), 7.53 (t, J=7.6 Hz, 2H), 7.35 (d, J=7.6 Hz, 1H), 5.63 (d, J=6.1 Hz, 1H), 5.51 (d, J=9.5 Hz, 1H), 4.35-4.13 (m, 3H), 3.78 (dt, J=9.6, 6.5 Hz, 1H), 3.19 (d, J=5.1 Hz, 1H), 1.53 (s, 3H), 1.32 (s, 3H).

[0533] Preparation of 6: To a solution of 5 (15.0 g, 38.7 mmol) in DCM (200.0 mL) was added Ag₂O (35.8 g, 154.8 mmol), CH₃I (54.6 g, 387.2 mmol) and NaI (1.1 g, 7.7 mmol), then the reaction mixture was stirred at r.t. overnight, after the reaction, filtrate was obtained through filtration, and the filtrate concentrated the solvent to obtain the product 6 (13.0 g, 75.2% yield,). ESI-LCMS: m/z=402.30 [M+H]⁺; ¹H NMR (400 MHz, DMSO-d₆) δ 11.30 (s, 1H), 8.22 (s, 1H), 8.00 (d, J=7.6 Hz, 2H), 7.71-7.20 (m, 4H), 5.56 (d, J=9.3 Hz, 1H), 4.33 (t, J=6.1 Hz, 1H), 4.26 (dd, J=6.2, 2.1 Hz, 1H), 4.20 (d, J=13.5 Hz, 1H), 3.98 (dd, J=13.5, 2.5 Hz, 1H), 3.66 (dd, J=9.3, 6.6 Hz, 1H), 3.34 (s, 3H), 1.57 (s, 3H), 1.32 (s, 3H).

[0534] Preparation of 7: To a solution of 6 (12.0 g, 29.9 mmol) was added CH₃COOH (120.0 mL), then the mixture was stirred at r.t. for 2 h, LC-MS and TLC showed that the raw material was disappeared, then the solvent was concentrated to get the crude product 7 (10.0 g, 83.3% yield,). ESI-LCMS: m/z=362.1 [M+H]⁺.

[0535] Preparation of 8: To a solution of 7 (10.0 g, 24.9 mmol) in dioxane:H₂O=3:1 (120.0 mL) was added NaIO₄ (8.8 g, 41.5 mmol), then the reaction mixture was stirred at r.t. for 2 h, LC-MS and TLC showed that the raw material was disappeared, then the reaction mixture was cooled to 0° C., and NaBH₄ (2.4 g, 41.5 mmol) was added into the mixture and stirred at 0° C. for 0.5 h, LC-MS and TLC showed that the raw material was disappeared, then NH₄C1 was added into the mixture to adjust pH to be slightly alkaline, and concentrated to give the crude product, which was purified by silica gel column (PE:EA=5:1 to 1:1) to give 8 (8.0 g, 79.5% yield). ESI-LCMS: m/z=364.1 [M+H]⁺; ¹H NMR (400 MHz, DMSO-d₆) δ 11.26 (s, 1H), 8.14 (d, J=7.5 Hz, 1H), 8.07-7.94 (m, 2H), 7.67-7.59 (m, 1H), 7.52 (t, J=7.6 Hz, 2H), 7.37 (s, 1H), 5.91 (d, J=6.0 Hz, 1H), 4.77 (t, J=5.6 Hz, 1H), 4.70 (t, J=5.1 Hz, 1H), 3.70 (ddd, J=11.5, 5.0, 2.5 Hz, 1H), 3.57-3.39 (m, 6H), 3.31 (s, 3H).

[0536] Preparation of 9: To a solution of 8 (4.0 g, 11.0 mmol) in pyridine (50.0 mL) was added DMTrCl (5.5 g, 16.5 mmol), then the reaction mixture was stirred at r.t. for 2 h, LC-MS showed that the raw material was 20.0% and The ratio of product to by-product was 3.5:1. then the solvent was concentrated to get residue which was purified by silica gel column to give the purified products and by-products was 5 g in total, then the product was purified by SFC to get 9 (3.0 g, 40.9% yield,). ESI-LCMS: m/z=666.2 [M+H]⁺; ¹H NMR (400 MHz, DMSO-d₆) δ 11.33 (s, 1H), 8.20 (d, J=7.4 Hz, 1H), 8.04 (d, J=7.7 Hz, 2H), 7.64 (t, J=7.4 Hz, 1H), 7.53 (t, J=7.6 Hz, 2H), 7.40 (d, J=7.8 Hz, 3H), 7.36-7.18 (m, 7H), 6.89 (d, J=8.4 Hz, 4H), 5.96 (d, J=5.7 Hz, 1H), 4.79 (t, J=5.7 Hz, 1H), 3.73 (s, 6H), 3.66-3.46 (m, 4H), 3.37 (s, 3H), 3.16 (ddd, J=10.1, 7.1, 3.0 Hz, 1H), 3.04 (dt, J=10.9, 3.4 Hz, 1H), 2.08 (s, 1H).

[0537] Preparation of 10: To a solution of 9 (2.8 g, 4.2 mmol) in DCM (30.0 mL) was added CEP[N(iPr)₂]₂ (1.3 g, 4.2 mmol) and DCI (601.2 mg, 5.1 mmol). The mixture was stirred at r.t. for 1 h. LC-MS showed 9 was consumed completely. The solution was washed with a solution of NaHCO₃ twice and washed with brine and dried over Na₂SO₄. Then concentrated to give a residue which was purified by Flash-Prep-HPLC with the following conditions (IntelFlash-1): Column, Cis silica gel; mobile phase, CH₃CN/H₂O (0.5% NH₄HCO₃)=1/1 increasing to CH₃CN/H₂O (0.5% NH₄HCO₃)=1/0 within 20.0 min, the eluted product was collected at CH₃CN/H₂O (0.5% NH₄HCO₃)=90/10; Detector, UV 254 nm. This resulted in to give 10 (2.8 g, 76.8% yield,). ESI-LCMS: m/z=866.2 [M+H]⁺; ¹H NMR (400 MHz, DMSO-d₆) δ 11.34 (s, 1H), 8.22 (d, J=7.4 Hz, 1H), 8.09-7.98 (m, 2H), 7.64 (t, J=7.4 Hz, 1H), 7.53 (t, J=7.6 Hz, 2H), 7.45 (d, J=7.3 Hz, 1H), 7.39 (d, J=7.5 Hz, 2H), 7.31 (t, J=7.6 Hz, 2H), 7.24 (t, J=9.1 Hz, 5H), 6.89 (d, J=8.8 Hz, 4H), 5.96 (d, J=6.1 Hz, 1H), 4.02-3.86 (m, 1H), 3.84-3.63 (m, 11H), 3.56 (dtq, J=13.3, 6.6, 3.5, 3.1 Hz, 3H), 3.37 (s, 2H), 3.16 (ddd, J=10.0, 6.8, 3.3 Hz, 1H), 3.04 (ddd, J=10.7, 5.5, 3.0 Hz, 1H), 2.75 (td, J=5.9, 2.3 Hz, 2H), 1.18-1.07 (m, 12H); ³¹P NMR (DMSO-d₆) δ 148.02 (d, J=12.0 Hz).

### Example 46

[chemical structure]

[0538] Preparation of 10: To the solution of 3 (200.0 g, 0.5 mol) in ACN (2000.0 mL) was added a solution of SnCl₄ in DCM (1000.0 mL) at 0° C. under N₂, and the reaction mixture was stirred at 0° C. for 4 h under N₂ atmosphere. Then the reaction solution was poured into saturated sodium bicarbonate solution, the resulting product was extracted with EA (3*500.0 mL). The combined organic layer was washed with water and brine, dried over Na₂SO₄, and concentrated to give the crude, which was purified by silica gel column (PE:EA=5:1 to 0:1) to give 10 (65.0 g, 31.4% yield) as a white solid. ESI-LCMS: m/z=412.0 [M+H]⁺; ¹H NMR (400 MHz, DMSO-d₆) δ 8.27 (s, 1H), 8.09 (s, 1H), 7.74-7.60 (m, 2H), 7.59-7.57 (m, 1H), 7.44-7.40 (m, 2H), 7.24 (s, 2H), 5.90 (d, J=9.6 Hz, 1H), 5.73 (dd, J=7.4 Hz, 1H), 4.63 (t, 1H), 4.50-4.30 (m, 2H), 4.21 (dd, J=13.6 Hz, 1H), 1.61 (s, 3H), 1.35 (s, 3H).

[0539] Preparation of 11: To a solution of 10 (40.0 g, 97.3 mmol) in DCM (500.0 mL) was added Et₃N (30.0 g, 297.0 mmol) and DMAP (1.2 g, 9.8 mmol) at r.t. The reaction mixture was replaced with N₂ over 3 times, then MMTrCl (45.0 g, 146.1 mmol) was added to the mixture. The reaction mixture was stirred at r.t. overnight. TLC and LC-MS showed that 10 was consumed, and the reaction mixture was added to an aqueous solution of NaHCO₃ in ice-water. Then extracted product with EA, washed the organic phase with brine, and dried the organic phase over Na₂SO₄, then concentrated to get 11 (66.5 g,) as a crude, used next step directly.

[0540] Preparation of 12: To a solution of 11 (66.5 g, 97.3 mmol) in pyridine (600.0 mL) was added 2N NaOH (H₂O:MeOH=4:1) (200.0 mL) at r.t. Then the reaction mixture was stirred at 0° C. for 30 min, LC-MS and TLC showed that the raw material was disappeared, then the mixture was poured into a solution of NH₄Cl, EA was added for extraction, and the organic phase was washed with brine, dried over Na₂SO₄ and concentrated to give the crude product which was purified by silica gel column (EA:PE=1:5 to 1:1) to give 12 (50.0 g, 88.7% yield for two step). ESI-LCMS: m/z=580.4 [M+H]⁺; ¹H NMR (400 MHz, DMSO-d₆) δ 8.44 (s, 1H), 7.92 (s, 1H), 7.36-7.16 (m, 13H), 6.89-6.80 (m, 2H), 5.59 (d, J=6.0 Hz, 1H), 5.35 (d, J=9.6 Hz, 1H), 4.32-4.12 (m, 4H), 4.08-3.95 (m, 3H), 3.72 (s, 3H), 1.99 (s, 3H), 1.54 (s, 3H), 1.32 (s, 3H), 1.17 (t, J=7.1 Hz, 3H).

[0541] Preparation of 13: To a solution of 12 (46.0 g, 79.4 mmol) in CH₃I (200.0 mL) was added Ag₂O (36.6 g, 158.4 mmol) and NaI (6.0 g, 42.5 mmol), then the reaction mixture was stirred at r.t. for 4 h, then the reaction mixture was filtrated and concentrated the solvent to obtain the product 13 (46.0 g, 97.6% yield), used next step directly. ESI-LCMS: m/z=594.3 [M+H]⁺.

[0542] Preparation of 14: To a stirred solution of DCA (22.5 mL) in DCM (750.0 mL) was added 13 (46.0 g, 77.5 mmol) and Et₃Si (185.0 mL) at r.t. And the reaction mixture was stirred at r.t. for 12 h. The reaction solution was evaporated to dryness under reduced pressure to give a residue, which was slurry with a solution of NaHCO₃ (50.0 mL) to get 14 (19.0 g, 76% yield), which was used next step directly.

[0543] Preparation of 15: To a solution of 14 (16.0 g, 49.7 mmol) in pyridine (200.0 mL) was added BzCl (9.0 g, 64.7 mmol) at 0° C. Then the reaction mixture was stirred at r.t. for 2 h. LC-MS showed 6 was consumed completely, then the mixture was cooled to 0° C., and a solution of NaOH in MeOH and H₂O (2N, 50.0 mL) was added into the reaction mixture, and the mixture was stirred for 1 h at 0° C., then the mixture was poured into a solution of NH₄Cl. The product was extracted with EA (300.0 mL) and the organic layer was washed with brine and dried over Na₂SO₄. Then the organic layer was concentrated to give a residue, which was purified by slurry with PE:EA (8:1, 900.0 mL) to get 15 (20.0 g, 95.0% yield). ESI-LCMS: m/z=426.2 [M+H]⁺; 1H NMR (400 MHz, DMSO-d₆) δ 11.21 (s, 1H), 8.77-8.69 (m, 2H), 8.06 (d, J=7.6 Hz, 2H), 7.65 (t, J=7.4 Hz, 1H), 7.56 (t, J=7.6 Hz, 2H), 7.34-7.23 (m, 4H), 7.23-7.12 (m, 5H), 6.89-6.80 (m, 4H), 5.90 (d, J=7.9 Hz, 1H), 4.36-4.29 (m, 1H), 4.06 (t, J=8.8 Hz, 1H), 3.92 (dd, J=25.0, 6.9 Hz, OH), 3.72 (d, J=1.0 Hz, 7H), 3.59 (dt, J=10.4, 6.6 Hz, 1H), 3.24 (s, 3H), 2.97 (d, J=7.7 Hz, 1H), 2.76 (q, J=5.5 Hz, 2H), 1.14 (dd, J=9.2, 5.7 Hz, 12H).

[0544] Preparation of 16: To a mixture solution of HCOOH (180.0 mL) and H₂O (20.0 mL) was added 15 (19.0 g, 44.7 mmol). The reaction mixture was stirred at r.t. for 4 h. LC-MS showed 15 was consumed completely. Then the reaction mixture was concentrated to give a residue which was purified by slurry with MeOH (100.0 mL) to get 16 (16.0 g, 92.7% yield) as a white solid. ESI-LCMS: m/z=385.9 [M+H]⁺; 1H NMR (400 MHz, DMSO-d₆) δ 11.21 (s, 1H), 8.77 (d, J=1.2 Hz, 2H), 8.09-8.02 (m, 2H), 7.70-7.61 (m, 1H), 7.56 (t, J=7.6 Hz, 2H), 5.56 (d, J=9.2 Hz, 1H), 5.21 (d, J=6.1 Hz, 1H), 4.94 (d, J=4.5 Hz, 1H), 4.18 (t, J=9.1 Hz, 1H), 4.09 (q, J=5.2 Hz, 1H), 3.88-3.71 (m, 4H), 3.21-3.14 (m, 6H).

[0545] Preparation of 17: To a solution of 16 (16.0 g, 41.4 mmol) in dioxane (200.0 mL) was added H₂O (32.0 mL), and NaIO₄ (9.7 g, 45.5 mmol), then the reaction mixture was stirred at r.t. for 1 h, LC-MS and TLC showed that the raw material was disappeared, then the reaction mixture was cooled to 0° C., and NaBH₄ (1.7 g, 45.5 mmol) was added into the mixture and stirred at 0° C. for 0.5 h, LC-MS and TLC showed that the intermediate state was disappeared, then the NH₄C1 was added into the mixture to adjust pH to be slightly alkaline, and concentrated at r.t. to give the crude product which was purified by silica gel column (DCM:MeOH=20:1 to 8:1) to give 17 (16.0 g, 99.5% yield). ESI-LCMS: m/z=388.0 [M+H]⁺; ¹H NMR (400 MHz, DMSO-d₆) δ 11.18 (s, 1H), 8.75 (s, 1H), 8.67 (s, 1H), 8.09-7.99 (m, 2H), 7.65 (t, J=7.4 Hz, 1H), 7.56 (t, J=7.6 Hz, 2H), 5.90 (d, J=7.6 Hz, 1H), 4.88 (t, J=5.7 Hz, 1H), 4.67 (t, J=5.5 Hz, 1H), 4.08-3.98 (m, 2H), 3.78 (ddd, J=12.1, 5.2, 3.1 Hz, 1H), 3.68-3.39 (m, 4H), 3.36 (s, OH), 3.20 (s, 3H), 1.99 (s, 1H), 1.17 (t, J=7.1 Hz, 1H).

[0546] Preparation of 18: To a solution of 17 (12.0 g, 31.0 mmol) in pyridine (50.0 mL) was added DMTrCl (11.5 g, 34.1 mmol), then the reaction mixture was stirred at r.t. for 2 h, LC-MS showed that the raw material was 15.0% remained and the ratio of product to by-product was 3.5:1. Then the reaction solution was poured into ice-water, and extracted with EA, wished with brine, dried over Na₂SO₄, filtered and concentrated to get residue which was purified by silica gel column to give the purified product and by-product were 13.0 g in total, then 4.0 g crude was purified by SFC to get 18 (3.3 g, 15.4% yield,). ESI-LCMS: m/z=690.3 [M+H]⁺; ¹H NMR (400 MHz, DMSO-d₆) δ 11.21 (s, 1H), 8.75 (s, 1H), 8.69 (s, 1H), 8.10-8.03 (m, 2H), 7.70-7.61 (m, 1H), 7.56 (t, J=7.6 Hz, 2H), 7.35-7.12 (m, 9H), 6.90-6.80 (m, 4H), 5.94 (d, J=7.5 Hz, 1H), 4.88 (t, J=5.6 Hz, 1H), 4.36 (t, J=5.1 Hz, 1H), 4.11 (dt, J=7.4, 3.6 Hz, 1H), 3.82 (ddd, J=11.9, 5.1, 3.1 Hz, 1H), 3.72 (d, J=1.3 Hz, 7H), 3.64 (ddd, J=11.9, 6.2, 4.2 Hz, 1H), 3.45 (qd, J=7.0, 4.9 Hz, 2H), 3.24 (s, 3H), 3.09 (ddd, J=9.9, 6.4, 3.2 Hz, 1H), 2.97 (ddd, J=9.9, 5.7, 3.2 Hz, 1H), 1.23 (s, OH), 1.06 (t, J=7.0 Hz, 1H).

[0547] Preparation of 19: To a suspension of 18 (3.3 g, 4.8 mmol) in DCM (40.0 mL) was added DCI (0.5 g, 4.0 mmol) and CEP[N(iPr)₂]₂ (1.6 g, 5.3 mmol). The mixture was stirred at r.t. for 0.5 h. LC-MS showed 10 was consumed completely. The solution was washed with a solution of NaHCO₃ twice and washed with brine and dried over Na₂SO₄. Then concentrated to give a residue which was purified by Flash-Prep-HPLC with the following conditions (IntelFlash-1): Column, Cis silica gel; mobile phase, CH₃CN/H₂O (0.5% NH₄HCO₃)=1/1 increasing to CH₃CN/H₂O (0.5% NH₄HCO₃)=1/0 within 20 min, the eluted product was collected at CH₃CN/H₂O (0.5% NH₄HCO₃)=1/0; Detector, UV 254 nm. This resulted in to give 19 (3.0 g, 3.9 mmol, 81.2% yield) as a white solid. ESI-LCMS: m/z=765.3 [M+H]⁺; ¹H NMR (400 MHz, DMSO-d₆) δ 11.22 (s, 1H), 8.80-8.71 (m, 2H), 8.11-8.04 (m, 2H), 7.65 (t, J=7.3 Hz, 1H), 7.56 (t, J=7.5 Hz, 2H), 7.36-7.24 (m, 4H), 7.24-7.15 (m, 5H), 6.89-6.82 (m, 4H), 5.92 (d, J=7.7 Hz, 1H), 4.34 (dt, J=7.5, 3.5 Hz, 1H), 4.08 (ddd, J=10.7, 7.3, 2.7 Hz, 1H), 4.03-3.89 (m, 1H), 3.80-3.72 (m, 1OH), 3.67-3.53 (m, 2H), 3.47 (dp, J=10.5, 3.4 Hz, 1H), 3.26 (s, 3H) 3.11 (ddd, J=10.3, 6.2, 3.5 Hz, 1H), 3.00 (q, J=6.6, 5.2 Hz, 1H), 2.77 (q, J=5.6 Hz, 2H), 2.08 (s, 1H), 1.15 (t, J=7.0 Hz, 12H).; ³¹P NMR (162 MHz, DMSO-d₆) δ 148.30, 147.99.

### Example 47

[chemical structure]

[0548] Preparation of 19: To a solution of 8 (8.0 g, 22.0 mmol) in EtOH (50.0 mL) was added a solution of CH₃NH₂ (50.0 mL), then the reaction mixture was stirred at r.t. for 4 h, after the reaction, the solvent was concentrated to give the crude, which was added into a mixture solvent of EA (20.0 mL) and PE (10.0 mL), then the mixture was stirred for 30 min and filtered to get 19 (5.5 g, 96.500 yield), which was used directly to next step.

[0549] Preparation of 20: (J. Chem. Soc., Perkin Trans. 1, 1992, 1943-1952) To a solution of 19 (5.0 g, 19.3 mmol) in H₂O (50.0 mL) and AcOH (50.0 mL) was added NaNO₂ (65.0 g, 772.0 mmol), then the reaction mixture was stirred at r.t. for 2 h, after the reaction, the reaction mixture was concentrated to give the crude product which was purified by silica gel column (DCM:MeOH=20:1 to 6:1) and MPLC (ACN: H₂O=0:100 to 10:90) to give 20 (3.0 g, 59.6% yield). ESI-LCMS: m/z=261.2 (M+H)⁺; ¹H NMR (400 MHz, DMSO-d₆) δ 11.29 (s, 1H), 7.66 (d, J=8.0 Hz, 1H), 5.67 (dd, J=17.5, 7.6 Hz, 2H), 4.74 (d, J=36.0 Hz, 2H), 3.86-3.63 (m, 1H), 3.58-3.40 (in, 6H).

[0550] Preparation of 21: To a solution of 20 (3.0 g, 11.5 mmol) in pyridine (30.0 mL) was added DMTrCl (3.9 g, 11.5 mmol), then the reaction mixture was stirred at r.t. for 2 h, LC-MS showed that the raw material was 20.00% and The ratio of product to by-product was 3:1, then the mixture was poured into a solution of NaHCO₃ (100.0 mL), and extracted with EA (100.0 mL), washed with brine and dried over Na₂SO₄, filtered and concentrated to get residue, which was purified by silica gel column to give The purified products and by-products were 5.0 g in total, then the product was purified by SFC to give 21 (1.8 g,). ESI-LCMS: m/z=561.2 [M+H]⁺; ¹H NMR (400 MHz, DMSO-d₆) δ 11.31 (s, 1H), 7.69 (d, J=8.1 Hz, 1H), 7.45-7.15 (m, 8H), 6.88 (d, J=8.5 Hz, 4H), 5.71 (d, J=6.8 Hz, 1H), 5.64 (d, J=8.0 Hz, 1H), 4.79 (t, J=5.5 Hz, 1H), 3.74 (s, 6H), 3.60 (s, 1H), 3.51 (d, J=5.5 Hz, 3H), 3.11 (d, J=6.7 Hz, 1H), 3.02 (d, J=7.0 Hz, 1H).

[0551] Preparation of 22: To a solution of 21 (1.8 g, 3.2 mmol) in DCM (20.0 mL) was added CEP[N(iPr)₂]₂ (1.0 g, 3.4 mmol) and DCI (321.0 mg, 2.7 mmol). The mixture was stirred at r.t. for 1 h. LC-MS showed 21 was consumed completely. The solution was washed with solution of NaHCO₃ twice and washed with brine and dried over Na₂SO₄. Then concentrated to give a residue, which was purified by Flash-Prep-HPLC with the following conditions (IntelFlash-1): Column, Cis silica gel; mobile phase, CH₃CN/H₂O (0.5% NH₄HCO₃)=1/1 increasing to CH₃CN/H₂O (0.5% NH₄HCO₃)=1/0 within 20.0 min, the eluted product was collected at CH₃CN/H₂O (0.5% NH₄HCO₃)=90/10; Detector, UV 254 nm. This resulted in to give 22 (2.0 g, 82% yield). ESI-LCMS: m/z=761.2 [M+H]⁺; ¹H NMR (400 MHz, DMSO-d₆) δ 11.35 (s, 1H), 7.73 (dd, J=8.0, 2.0 Hz, 1H), 7.39 (d, J=7.4 Hz, 2H), 7.35-7.18 (m, 7H), 6.94-6.82 (m, 4H), 5.81-5.74 (m, 1H), 5.67 (d, J=8.0 Hz, 1H), 4.11-3.85 (m, 1H), 3.82-3.67 (m, 11H), 3.67-3.50 (m, 5H), 3.17-3.09 (m, 1H), 3.09-3.01 (m, 1H), 2.74 (td, J=5.8, 2.9 Hz, 2H), 1.13 (dd, J=9.2, 6.7 Hz, 13H); ³¹P NMR (DMSO-d₆) δ 148.09 (d, J=41.8 Hz).

### Example 48

[chemical structure]

[0552] Preparation of 2 (J. Chem. Soc., Perkin Trans. 1, 1992, 1943-1952): To a solution of 1 (150.0 g, 999.1 mmol) in DMF (1000.0 mL) was added P-TsOH (1.7 g, 10.0 mmol), then 2,2-dimethoxy-propane (312.2 g, 3.0 mol) was added to the reaction mixture. The reaction mixture was stirred for 5 h at r.t. 90.0% 1 was consumed by TLC. Then NaHCO₃ (8.4 g, 99.9 mmol) was added to the reaction mixture, filtered out the solid after 30 min, and concentrated the organic phase by vacuum to obtain crude, which was purified by c.c. (PE:EA=1:1 to 0:1) to get compound 2 (115.0 g, 60.5% yield) as a white solid.

[0553] Preparation of 22: A solution of 2 (115.0 g, 604.6 mmol) in pyridine (600.0 mL) was cooled to 0° C., then Ac₂O (185.2 g, 1.81 mol) was added drop wise to the reaction mixture. The reaction was stirred for 2 h at r.t., and the raw material was consumed by TLC. The reaction solution was added into water, extracted product with EA. The organic phase was washed with brine, and dried the organic phase with Na₂SO₄, and concentrated to get 22 (150.0 g, 90.4% yield), which was used for next step directly. ¹H NMR (400 MHz, Chloroform-d) δ 6.20 (d, J=3.4 Hz, 1H), 5.66 (d, J=6.8 Hz, 1H), 5.17 (t, J=6.9 Hz, 1H), 5.10 (dd, J=7.0, 3.4 Hz, 1H), 4.40-4.25 (m, 3H), 4.21 (dd, J=7.0, 6.1 Hz, 1H), 4.16-4.02 (m, 3H), 3.95 (dd, J=12.9, 4.4 Hz, 1H), 2.17 (s, 1H), 2.15-2.03 (m, 12H), 1.56 (d, J=4.0 Hz, 6H), 1.37 (d, J=3.1 Hz, 6H).

[0554] Preparation of 23: To a solution of 22 (150.0 g, 546.9 mmol) in ACN (2200.0 mL) was added 6-chloroguanine (139.1 g, 820.4 mmol) and BSA (333.7 g, 1.6 mol) at r.t., then the reaction mixture was replaced with N₂ over 3 times. The reaction was stirred for 30 min at 50° C. After that, the reaction mixture was cooled to 0° C. under N₂. Then TMSOTf (182.1 g, 820.4 mmol) was added into the mixture. After addition, the reaction was stirred for 1.5 h at 70° C. TLC and LC-MS showed the raw material was consumed. Concentrated the most organic solvent by vacuum, then the residual was added to an aqueous solution of NaHCO₃ in ice-water, extracted product with EA (4.0 L), dried the organic phase over Na₂SO₄, and filtered and concentrated to get crude, which was purified by c.c. (DCM to DCM:EA=5:1) to get compound 23 (82.0 g, 35.0% yield,) as a white solid. ESI-LCMS: m/z=384.8 [M+H]⁺; ¹H NMR (400 MHz, DMSO-d₆) δ 8.23 (s, 1H), 7.04 (d, J=22.3 Hz, 2H), 5.57 (d, J=9.6 Hz, 1H), 5.40 (dd, J=9.6, 7.3 Hz, 1H), 4.48 (dd, J=7.4, 5.4 Hz, 1H), 4.40-4.30 (m, 2H), 4.11 (dd, J=13.6, 2.4 Hz, 1H), 1.81 (s, 3H), 1.55 (s, 3H), 1.34 (s, 3H).

[0555] Preparation of 24: To a solution of 23 (82.0 g, 192.3 mmol) in DCM (1000.0 mL) was added Et₃N (59.4 g, 576.9 mmol) and DMAP (2.4 g, 19.2 mmol) at r.t. The reaction mixture was replaced with N₂ over 3 times, then MMTrCl (90.9 g, 288.4 mmol) was added into the mixture. The reaction mixture was stirred at r.t. overnight. TLC and LC-MS showed that 92.0% raw material was consumed, and the reaction mixture was added to an aqueous solution of NaHCO₃ in ice-water, then extracted product with EA. Washed the organic phase with brine, and dried the organic phase over Na₂SO₄, then concentrated to get crude, which was purified by c.c. (DCM) to give compound 24 (110.0 g, 86.4% yield) as a white solid. ESI-LCMS: m/z=657.1 [M+H]⁺; ¹H NMR (400 MHz, DMSO-d₆) δ 8.21 (s, 1H), 7.37-7.31 (m, 4H), 7.29-7.23 (m, 6H), 7.20-7.15 (m, 2H), 6.86-6.80 (m, 2H), 5.75 (s, 1H), 5.23 (dd, J=9.6, 7.2 Hz, 1H), 4.85 (s, 1H), 4.44-4.16 (m, 3H), 3.71 (s, 4H), 1.70 (s, 3H), 1.49 (s, 3H), 1.31 (s, 3H).

[0556] Preparation of 25: To a solution of 24 (110.0 g, 164.3 mmol) in a mixed solvent of THF (500.0 mL) and MeOH (160.0 mL) was added NH₄OH (330.0 mL). The reaction mixture was stirred overnight at r.t., and the raw material was consumed by TLC and LC-MS. The reaction liquid was added into water, extracted product with EA. Washed the organic phase with brine, then dried the organic phase over Na₂SO₄, then concentrated to get the crude, which was purified by c.c. (PE:EA=10:1˜1:2) to give compound 25 (98.0 g, 94.2% yield) as a white solid. ESI-LCMS: m/z=615.1 [M+H]⁺; ¹H NMR (400 MHz, DMSO-d₆) δ 8.32 (s, 1H), 7.36 (dt, J=8.2, 1.4 Hz, 4H), 7.31-7.21 (m, 6H), 7.15 (t, J=7.2 Hz, 2H), 6.85-6.76 (m, 2H), 5.57 (d, J=4.6 Hz, 1H), 4.69 (s, 1H), 4.25 (dt, J=5.1, 2.4 Hz, 1H), 4.03 (q, J=7.1 Hz, 4H), 3.70 (s, 3H), 3.62-3.44 (m, 1H), 1.51 (s, 3H), 1.31 (s, 3H).

[0557] Preparation of 26 (Ref WO2011/95576, 2011, Al): To a solution of 25 (70.0 g, 114.0 mmol) in CH₃I (350.0 mL) was added Ag₂O (79.2 g, 342.0 mmol) at r.t. Then the reaction mixture was stirred for 4 h at r.t. TLC and LC-MS showed that the raw material was consumed. Filtered out the residue with diatomite, and concentrated the filtrate by vacuum to get crude, which was purified by c.c. (PE:EA=10:1˜1:1) to get compound 26 (28.0 g, 31.3% yield) as a white solid. ESI-LCMS: m/z=629.1 [M+H]⁺.

[0558] Preparation of 27: A solution of 3-hydroxy-propionitrile (15.6 g, 219.7 mmol) in THF (200.0 mL) was cooled to 0° C. The reaction mixture was replaced by N₂ over 3 times. Then NaH (12.4 g, 310.0 mmol, 60.0%) was added to the reaction mixture in turn. The reaction was stirred for 30 min at r.t., and then the reaction was cooled to 0° C. again. A solution of 26 (26.0 g, 33.0 mmol) in THF (150.0 mL) was added drop wise to the reaction mixture. Then the reaction mixture was stirred at r.t. overnight. TLC and LC-MS showed the raw material was consumed. The reaction liquid was added into water, extracted product with EA. The organic phase was washed with brine, and dried over Na₂SO₄, then concentrated to get the crude, which was purified by c.c. (DCM:MeOH=50:1˜30:1) to get compound 27 (18.0 g, 88.0% yield) as white solid. ESI-LCMS: m/z=610.7 [M+H]⁺; ¹H NMR (400 MHz, DMSO-d₆) δ 10.68 (s, 1H), 7.90 (s, 1H), 7.69 (s, 1H), 7.34-7.15 (m, 12H), 6.92-6.81 (m, 2H), 4.46 (d, J=9.5 Hz, 1H), 4.22 (dt, J=5.5, 2.5 Hz, 1H), 4.07 (t, J=6.4 Hz, 1H), 3.84 (dd, J=13.5, 2.1 Hz, 1H), 3.64-3.54 (m, 1H), 3.36 (dd, J=13.3, 2.8 Hz, 1H), 3.08 (s, 3H), 2.59 (t, J=6.0 Hz, 3H), 1.49 (s, 3H), 1.30 (s, 3H).

[0559] Preparation of 28 (Beigelman, Leonid; Deval, Jerome; Jin, Zhinan WO2014/209979, 2014, A1,): To a solution of 27 (18.0 g, 29.5 mmol) in DCM (300.0 mL) was added triethylsilane (70.0 mL) and DCA (10.0 mL) at r.t. Then the reaction mixture was stirred for 6 h at r.t., TLC and LC-MS showed that the raw material was consumed. Concentrated the almost organic solvent by vacuum, then PE (600.0 mL) was added to the reaction mixture. Filtered of the organic phase to get the solid, which was purified by MPLC (MeCN: H₂O=40:60 to 50:50) to get compound 28 (7.5 g, 75.0% yield) as a white solid. ESI-LCMS: m/z=338.3 [M+H]⁺; ¹H NMR (400 MHz, DMSO-d₆) δ 10.70 (s, 1H), 8.03 (s, 1H), 6.49 (s, 2H), 5.15 (d, J=9.6 Hz, 1H), 4.28 (d, J=5.1 Hz, 2H), 4.20 (d, J=13.6 Hz, 1H), 3.93 (ddd, J=13.3, 10.6, 3.7 Hz, 2H), 3.26 (s, 3H), 1.59 (s, 3H), 1.33 (s, 3H);

[0560] Preparation of 29: A solution of 28 (7.0 g, 20.6 mmol) in Pyr (150.0 mL) was cooled to 0° C. Then the reaction mixture was added i-BuCl (6.6 g, 61.8 mmol) drop wise. The reaction mixture was stirred for 30 min, TLC and LC-MS showed the raw material was consumed. The reaction liquid was added to ice-water, extracted product with EA. The organic phase was washed with brine, and dried over Na₂SO₄, and filtered and concentrated to get the crude, which was purified by c.c. (DCM:MeOH=100:1˜30:1) to get compound 29 (5.8 g, 68.6% yield) as a white solid. ESI-LCMS: m/z=409.4 [M+H]⁺; ¹H NMR (400 MHz, DMSO-d₆) δ 12.13 (s, 1H), 11.66 (s, 1H), 8.39 (s, 1H), 5.24 (d, J=9.6 Hz, 1H), 4.36-4.23 (m, 3H), 3.99-3.88 (m, 2H), 3.27 (s, 4H), 2.78 (hept, J=6.8 Hz, 1H), 1.61 (s, 3H), 1.35 (s, 3H), 1.12 (d, J=6.8 Hz, 6H).

[0561] Preparation of 30: A solution of 29 (5.8 g, 14.1 mmol) was added into a mixed solvent of HCOOH (54.0 mL) and H₂O (6.0 mL) at r.t. Then reaction mixture was stirred for 1 h at r.t. TLC and LC-MS showed the raw material was consumed. Concentrated the reaction solution by vacuum at r.t. to get compound 30 (5.2 g, 14.0 mmol, 98.0% yield), which was used for next step directly. ESI-LCMS: m/z=368.4 [M+H]⁺; ¹H NMR (400 MHz, DMSO-d₆) δ 12.13 (s, 1H), 11.72 (s, 1H), 8.30 (s, 1H), 8.14 (s, 2H), 5.19 (d, J=9.2 Hz, 1H), 3.93 (t, J=9.2 Hz, 1H), 3.85 (dd, J=12.4, 1.9 Hz, 1H), 3.77 (d, J=3.7 Hz, 1H), 3.69-3.62 (m, 2H), 3.20 (s, 3H), 2.79 (h, J=6.8 Hz, 1H), 1.13 (dd, J=6.9, 1.2 Hz, 6H).

[0562] Preparation of 31: To a solution of 30 (5.2 g, 14.0 mmol) in dioxane (90.0 mL) and H₂O (30.0 mL) was added NaIO₄ (3.7 g, 15.4 mmol) at r.t. The reaction mixture was stirred for 3 h at r.t. LC-MS showed the raw material was consumed, and the reaction solution was cooled to 0° C. Then NaBH₄ (970.0 mg, 25.2 mmol) was added to the reaction mixture, and the raw material was consumed after 3 h by LC-MS. The reaction liquid was quenched with ammonium chloride, and adjusted the pH to 6-7 with 1N HCl, the mixture solution was concentrated to get the crude, which was purified by c.c. (DCM:MeOH=100:1-30:1) to get compound 31 (4.0 g, 68.6% yield) as a white solid. ESI-LCMS: m/z=370.4 [M+H]⁺; ¹H NMR (400 MHz, DMSO-d₆) δ 11.91 (d, J=151.0 Hz, 2H), 8.62-8.51 (m, 1H), 8.18 (s, 1H), 7.44-7.33 (m, 1H), 5.62 (d, J=7.9 Hz, 1H), 4.84 (t, J=5.7 Hz, 1H), 4.65 (d, J=5.2 Hz, 1H), 3.84 (dd, J=7.7, 3.5 Hz, 1H), 3.76 (ddd, J=12.1, 4.7, 2.7 Hz, 1H), 3.60 (ddd, J=12.0, 5.8, 3.6 Hz, 1H), 3.46 (d, J=8.8 Hz, 2H), 3.16 (s, 3H), 2.77 (h, J=6.8 Hz, 1H), 1.12 (dd, J=6.8, 2.4 Hz, 6H);

[0563] Preparation of 32: A solution of 31 (4.0 g, 6.4 mmol) was dissolved in pyridine (100.0 mL), and the reaction mixture was replaced by N₂ over 3 times, and then DMTrCl (5.1 g, 8.9 mmol) was added to the reaction mixture at r.t. Then the reaction was stirred for 30 min, TLC and LC-MS showed raw material was consumed. The reaction liquid was added into ice-water, and extracted product with EA. The organic phase was washed with brine, and dried the organic phase over Na₂SO₄, and concentrated to get crude, which was purified by c.c. (DCM:MeOH=100:1˜30:1) and SFC to get compound 32 (2.7 g, 37.1% yield) as a white solid. ESI-LCMS: m/z=672.7 [M+H]⁺; ¹H NMR (400 MHz, DMSO-d₆) δ 11.50 (s, 2H), 8.22 (s, 1H), 7.32-7.24 (m, 4H), 7.22-7.12 (m, 5H), 6.84 (dd, J=9.0, 2.4 Hz, 4H), 5.63 (d, J=7.9 Hz, 1H), 4.85 (t, J=5.6 Hz, 1H), 3.95 (dt, J=7.4, 3.3 Hz, 1H), 3.85-3.77 (m, 1H), 3.73 (s, 7H), 3.65-3.57 (m, 1H), 3.43 (ddt, J=9.9, 6.9, 3.4 Hz, 1H), 3.05 (ddd, J=10.0, 6.2, 3.3 Hz, 1H), 2.96 (ddd, J=10.0, 5.6, 3.4 Hz, 1H), 2.78 (p, J=6.8 Hz, 1H), 1.11 (d, J=6.7 Hz, 6H).

[0564] Preparation of 33: To a solution of 32 (2.7 g, 2.4 mmol) in DCM (35.0 mL) was added DCI (390.0 mg, 2.0 mmol) at r.t. Then CEP [N(iPr)₂]₂ (1.2 g, 2.5 mmol) was added to the reaction mixture, then reaction mixture was stirred for 30 min at r.t. LC-MS showed raw material was consumed. The reaction liquid was added to an aqueous solution of NaHCO₃ into ice-water, and extracted product with DCM, washed the organic phase with brine, and dried the organic phase over Na₂SO₄, then filtered and concentrated to give a residue, which was purified by Flash-Prep-HPLC with the following conditions (IntelFlash-1): Column, C18 silica gel; mobile phase, CH₃CN/H₂O (0.5% NH₄HCO₃)=1/1 increasing to CH₃CN/H₂O (0.5% NH₄HCO₃)=1/0 within 20.0 min, the eluted product was collected at CH₃CN/H₂O (0.5% NH₄HCO₃)=100/0; Detector, UV 254 nm. This resulted in to give compound 33 (2.0 g, 56.4% yield) as a white solid. ESI-LCMS: m/z=872.3 [M+H]⁺; 1H NMR (400 MHz, DMSO-d₆) δ 11.79 (s, 2H), 8.23 (d, J=1.7 Hz, 1H), 7.35-7.07 (m, 9H), 6.92-6.75 (m, 4H), 5.52 (d, J=8.0 Hz, 1H), 4.21 (s, 1H), 4.10-3.99 (m, 1H), 3.84-3.65 (m, 1OH), 3.63-3.52 (m, 2H), 3.45 (ddd, J=10.2, 6.7, 3.6 Hz, 1H), 3.34 (s, 1H), 3.22 (s, 3H), 3.07 (ddd, J=10.2, 6.4, 3.4 Hz, 1H), 2.97 (ddd, J=10.0, 5.6, 3.5 Hz, 1H), 2.78 (dt, J=12.2, 6.4 Hz, 3H), 1.20-1.05 (m, 18H), ³¹P NMR (162 MHz, DMSO-d₆) δ 148.20, 147.13.

### Example 49

[chemical structure]

### Example 50

[chemical structure]

[0565] Preparation of 2: To a solution of 1-bromonaphthalene (5.2 g, 25.0 mmol) in dry THF (100.0 mL) was added n-BuLi (13.5 mL, 21.7 mmol, 1.6 M) drop wise at −78° C., then the mixture was stirred at −78° C. for 0.5 h, after that, a solution of 1 (5.5 g, 16.7 mmol) in THF (20.0 mL) was added into the mixture drop wise maintaining inner temperature below −70° C., then the reaction mixture was stirred for 1 h at −70° C. LC-MS showed 1 was consumed completely, the reaction was quenched with saturated ammonium chloride solution (80.0 mL) and extracted with EA, The organic layer was washed with brine, dried over Na₂SO₄, and concentrated under reduced pressure to give a residue, which was purified by Flash-Prep-HPLC with the following conditions (IntelFlash-1): Column, Cis silica gel; mobile phase, CH₃CN/H₂O (0.5% NH₄HCO₃)=2/3 increasing to CH₃CN/H₂O (0.5% NH₄HCO₃)=4/1 within 25 min, the eluted product was collected at CH₃CN/H₂O (0.5% NH₄HCO₃)=3/2; Detector, UV 254 nm. This resulted in to give 2 (5.8 g, 76.3% yield) as a white solid. ESI-LCMS: m/z 441 [M-OH].

[0566] Preparation of 3: To the solution of 2 (5.8 g, 12.6 mmol) in DCM (100.0 mL) was added TES (1.7 g, 14.7 mmol) at −78° C., BF₃. Et₂O (2.7 g, 18.9 mmol) was added into the mixture drop-wise at −78° C. The mixture was stirred at −40° C. for 1 h. LC-MS showed 2 was consumed completely, the solution was added into a saturated sodium bicarbonate solution (50.0 mL) and extracted with DCM. The organic layer was washed with brine, dried over Na₂SO₄, and concentrated under reduced pressure to give a residue, which was purified by Flash-Prep-HPLC with the following conditions (IntelFlash-1): Column, Cis silica gel; mobile phase, CH₃CN/H₂O (0.5% NH₄HCO₃)=2/3 increasing to CH₃CN/H₂O (0.5% NH₄HCO₃)=4/1 within 25 min, the eluted product was collected at CH₃CN/H₂O (0.5% NH₄HCO₃)=7/3; Detector, UV 254 nm. This resulted in to give 3 (2.7 g, 48.2%) as a white solid. ESI-LCMS: m/z 460 [M+H₂O]⁺; ¹H-NMR (600 MHz, CDCl₃): δ 8.01-8.00 (d, J=6.5 Hz, 1H), 7.88-7.87 (d, J=7.6 Hz, 2H), 7.77-7.76 (d, J=8.2 Hz, 1H), 7.56-7.49 (m, 2H), 7.38-7.23 (m, 11H), 6.98-5.94 (d, J=26.9 Hz, 1H), 5.09-4.99 (dd, J=61.1 Hz, 1H), 4.71-4.69 (d, J=11.6 Hz, 1H), 4.66-4.59 (m, 2H), 4.43-4.41 (d, J=11.6 Hz, 2H), 4.14-4.08 (m, 1H), 4.02-4.00 (dd, J=13.4 Hz, 1H), 3.81-3.78 (dd, J=14.8 Hz, 1H); ¹⁹F-NMR (CDCl₃): δ −193.24.

[0567] Preparation of 4: To a solution of 3 (2.7 g, 6.0 mmol) in dry DCM (40.0 mL) was added BCl₃ (36.0 mL, 36.0 mmol, 1 M) drop wise at −78° C., and the reaction mixture was stirred at −78° C. for 0.5 h. LC-MS showed 3 was consumed completely. After completion of reaction, the resulting mixture was quenched with MeOH (20.0 mL), then neutralized with sodium hydroxide solution (40.0 mL, 2 M). The mixture was extracted with DCM and concentrated to give a crude, the crude was dissolved in MeOH (30.0 mL) and added a sodium hydroxide solution (30.0 mL, 4 M), and the mixture was stirred at r.t. for 30 min. The mixture was extracted with EA, the organic layer was washed with brine, dried over Na₂SO₄, and concentrated under reduced pressure to give a residue, which was purified by silica gel column chromatography (DCM:MeOH=40:1˜15:1) to give 4 (1.3 g, 81.2%) as a white solid. ESI-LCMS: m/z 261 [M−H]⁻; ¹H-NMR (DMSO-d₆): δ 7.98-7.97 (d, J=10.2 Hz, 2H), 7.89-7.87 (m, 2H), 7.63-7.49 (m, 3H), 5.80-5.76 (d, J=26.3 Hz, 1H), 5.43 (s, 1H), 5.00 (s, 1H), 4.85-4.76 (d, J=58.4 Hz, 1H), 4.03-3.85 (m, 3H), 3.68-3.66 (m, 1H), 3.65-3.53 (m, 1H); ¹⁹F-NMR (DMSO-d₆): δ −192.76.

[0568] Preparation of 5: To a solution of 4 (1.3 g, 5.0 mmol) in pyridine (20.0 mL) was added DMTrCl (6.1 g, 16.0 mmol) at r.t. The reaction mixture was stirred at r.t. for 1 h. The LC-MS showed 4 was consumed and water (100.0 mL) was added. The product was extracted with EA and the organic layer was washed with brine and dried over Na₂SO₄, concentrated to give the crude, which was further purified by silica gel (EA: PE=1:30˜1:10) to give 5 (2.2 g, 78.5%) as a yellow solid. ESI-LCMS: m/z 563 [M−H]⁻; ¹H-NMR (600 MHz, DMSO-d₆): δ 8.03-7.99 (m, 2H), 7.91-7.86 (m, 2H), 7.64-7.57 (m, 2H), 7.49-7.48 (d, J=6.8 Hz, 2H), 7.40-7.24 (m, 8H), 6.89-6.88 (m, 4H), 5.92-5.88 (d, J=26.6 Hz, 1H), 5.50-5.49 (d, J=4.5 Hz, 1H), 4.96-4.87 (d, J=56.2 Hz, 1H), 4.18-4.14 (m, 2H), 3.74 (s, 6H), 3.42-3.40 (d, J=9.9 Hz, 1H), 3.33 (m, 2H); ¹⁹F-NMR (DMSO-d₆): δ −192.18.

[0569] Preparation of 6: To a suspension of 5 (2.2 g, 3.9 mmol) in DCM (20.0 mL) was added DCI (391.0 mg, 3.3 mmol) and CEP[N(iPr)₂]₂ (1.4 g, 4.7 mmol). The mixture was stirred at r.t. for 1 h. The LC-MS showed 5 was consumed completely. The solution was washed with a saturated sodium bicarbonate solution and brine successively, dried over Na₂SO₄, concentrated to give the crude, which was purified by Flash-Prep-HPLC with the following conditions (IntelFlash-1): Column, Cis silica gel; mobile phase, CH₃CN/H₂O (0.5% NH₄HCO₃)=1/1 increasing to CH₃CN/H₂O (0.5% NH₄HCO₃)=1/0 within 20 min, the eluted product was collected at CH₃CN/H₂O (0.5% NH₄HCO₃)=1/0; Detector, UV 254 nm. This resulted in to give 6 (2.5 g, 83.8%) as a white solid. ESI-LCMS: m/z 765 [M+H]⁺; ¹H-NMR (400 MHz, DMSO-d₆): δ 8.07-7.86 (m, 4H), 7.64-7.56 (m, 2H), 7.49-7.45 (m, 2H), 7.41-7.21 (m, 8H), 6.89-6.84 (m, 4H), 6.02-5.93 (m, 1H), 5.19-4.98 (m, 1H), 4.61-4.34 (m, 1H), 4.26-4.24 (m, 1H), 3.74-3.73 (m, 6H), 3.70-3.61 (m, 1H), 3.57-3.42 (m, 4H), 3.29-3.24 (m, 1H), 2.67-2.64 (m, 1H), 2.56-2.52 (m, 1H), 1.09-1.04 (m, 1H), 0.98-0.97 (d, J=6.7 Hz, 3H), 0.89-0.87 (d, J=6.7 Hz, 3H); ¹⁹F-NMR (DMSO-d₆): δ −191.75, −191.76, −191.84, −191.85; ³¹P-NMR (DMSO-d₆): δ 149.51, 149.47, 149.16, 149.14.

### Example 51

[chemical structure]

### Preparation of 9

[0570] To a solution of 8 (from Example 44) (6.6 g, 10.86 mmol, 85% purity, 1 eq) and DBU (3.31 g, 21.72 mmol, 3.27 mL, 2 eq) in DMF (70 mL) was added BOMCl (2.55 g, 16.29 mmol, 2.26 mL, 1.5 eq) at 0° C. The mixture was stirred at 20° C. for 12 h. The mixture was diluted with EtOAc (180 mL) and washed with H₂O (80 mL*3), and brine (80 mL), dried over Na₂SO₄, filtered and concentrated under reduced pressure to give a residue. The residue was purified by flash silica gel chromatography (ISCO®; 80 g SepaFlash® Silica Flash Column, Eluent of 10-60%, EtOAc/PE gradient @60 mL/min) to give 9 (5.2 g, 70% yield,) as a white foam. LCMS (ESI): m/z 659.1.; ¹H NMR (400 MHz, DMSO-d₆) δ=7.63 (d, J=8.3 Hz, 1H), 7.40-7.15 (m, 14H), 6.85 (t, J=8.0 Hz, 4H), 5.97 (s, 1H), 5.75 (d, J=8.0 Hz, 1H), 5.39-5.26 (m, 2H), 5.24 (d, J=2.0 Hz, 1H), 4.61 (s, 2H), 3.97 (s, 1H), 3.94-3.83 (m, 2H), 3.68 (d, J=10.0 Hz, 6H), 3.38 (s, 1H)

### Preparation of 10

[0571] To a solution of 9 (5.2 g, 8.17 mmol, 1 eq) and dimethoxyphosphorylmethyl trifluoromethanesulfonate (6.67 g, 24.50 mmol, 3 eq) in THF (50 mL) was added NaH (816.65 mg, 20.42 mmol, 60% purity, 2.5 eq) at −5° C. The mixture was stirred at 0° C. for 0.5 h. The reaction mixture was quenched by addition H₂O (50 mL) and diluted with EtOAc (100 mL), then washed with H₂O (50 mL), brine (50 mL), the organic layer was dried over Na₂SO₄, filtered and concentrated under reduced pressure. The residue was purified by flash silica gel chromatography (ISCO®; 80 g SepaFlash® Silica Flash Column, Eluent of 0-50%, EtOAc/DCM gradient @60 mL/min) to give 10 (4.2 g, 66.42% yield,) as a white foam. LCMS (ESI): m/z 781.1 [M+Na]⁺, ¹H NMR (400 MHz, CDCl₃) δ=7.49-7.25 (m, 14H), 7.21-7.15 (m, 1H), 6.82 (d, J=8.8 Hz, 4H), 6.46 (s, 1H), 5.65 (d, J=8.2 Hz, 1H), 5.57-5.39 (m, 2H), 4.72 (s, 2H), 4.16-4.07 (m, 2H), 3.93 (dd, J=2.6, 10.8 Hz, 1H), 3.81-3.59 (m, 11H), 3.81-3.59 (m, 1H), 3.24 (dd, J=10.6, 13.5 Hz, 1H), 3.10 (dd, J=9.8, 13.3 Hz, 1H), 2.79 (d, J=2.2 Hz, 1H); ³¹P NMR (CD₃CN) δ=22.37 (s)

### Preparation of 11

[0572] To a solution of 10 (4.6 g, 6.06 mmol, 1 eq) and NaI (2.73 g, 18.19 mmol, 3 eq) in MeCN (15 mL) was added chloromethyl 2,2-dimethylpropanoate (3.65 g, 24.25 mmol, 3.51 mL, 4 eq). The mixture was stirred at 85° C. for 24 h. The reaction mixture was concentrated under reduced pressure to give a residue. The residue was purified by flash silica gel chromatography (ISCO®; 40 g SepaFlash® Silica Flash Column, Eluent of 0-50%, EtOAc/PE gradient @40 mL/min) to give 11 (2.7 g, 44.6% yield) as a pale yellow solid. LCMS (m/z): 981.1 [M+Na]⁺.

### Preparation of 12

[0573] To a solution of 11 (2.7 g, 2.82 mmol, 1 eq) in DCM (20 mL) was added Et₃S¹H (645.45 mg, 2.82 mmol, 5 mL, 1 eq), followed by addition of TFA (1.54 g, 13.51 mmol, 1 mL, 4.80 eq). The mixture was stirred at 20° C. for 0.5 h. The reaction mixture was concentrated under reduced pressure to give a residue. The residue was purified by flash silica gel chromatography (ISCO®; 24 g SepaFlash® Silica Flash Column, Eluent of 0-50%, EtOAc/DCM gradient @30 mL/min) to give 12 (1.6 g, 84.82% yield,) as a pale yellow solid. LCMS (ESI): m/z 679.1 [M+Na]⁺; ¹H NMR (400 MHz, CDCl₃) δ=7.44 (d, J=8.2 Hz, 1H), 7.38-7.26 (m, 5H), 5.76 (d, J=8.2 Hz, 1H), 5.69-5.62 (m, 4H), 5.51-5.43 (m, 1H), 5.51-5.43 (m, 1H), 4.70 (s, 2H), 4.30 (s, 1H), 4.26-4.06 (m, 4H), 3.90 (dd, J=4.9, 8.4 Hz, 2H), 3.22-3.06 (m, 1H), 1.22 (s, 18H); ³¹P NMR (162 MHz, CD₃CN) δ=20.25 (s, 1P).

### Preparation of 13

[0574] To a mixture of 12 (1.4 g, 2.13 mmol, 1 eq) in isopropanol (20 ml) and H₂O (2 mL) added Pd/C (1.4 g,) and HCOOH (51.22 mg, 1.07 mmol, 2 mL) under N₂. The suspension was degassed under vacuum and purged with H₂ several times. The mixture was stirred under H₂ (15 PSI) at 15° C. for 5 h. The reaction mixture was filtered and the filtrate was concentrated to give a residue. The residue was purified by flash silica gel chromatography (ISCO®; 24 g SepaFlash® Silica Flash Column, Eluent of 0-50%, EtOAc/DCM gradient @30 mL/min) to give 13 (848 mg, 74.14% yield) as a white foam. LCMS (ESI): m/z 537.0 [M+H]^{+; 1}H NMR (400 MHz, CDCl₃) δ=10.01 (s, 1H), 7.53 (d, J=8.0 Hz, 1H), 5.78-5.63 (m, 6H), 4.40 (s, 1H), 4.35-4.22 (m, 3H), 4.11 (d, J=1.5 Hz, 1H), 3.88 (d, J=8.5 Hz, 2H), 1.22 (s, 18H); ³¹P NMR (162 MHz, CD₃CN) δ=20.17 (s, 1P.)

### Preparation of 14

[0575] To a solution of 13 (848 mg, 1.58 mmol, 1 eq) in DCM (10 mL) was added 3-bis(diisopropylamino)phosphanyloxypropanenitrile (571.73 mg, 1.90 mmol, 602.45 uL, 1.2 eq) at 0° C., followed by addition of 1H-imidazole-4,5-dicarbonitrile (186.7 mg, 1.58 mmol, 1 eq). The mixture was stirred at 15° C. for 1 h. The reaction mixture was quenched by addition of sat. aq·NaHCO₃ (10 mL) and diluted with DCM (20 mL). Then the organic layer was washed with sat. aq·NaHCO₃ (10 mL*2), dried over Na₂SO₄, filtered and concentrated under reduced pressure. The residue was purified by flash silica gel chromatography (ISCO®; 12 g SepaFlash® Silica Flash Column, Eluent of 0-50%, phase A: PE with 0.5% TEA; phase B: EA with 10% EtOH, 30 mL/min) to give 14 (720 mg, 61.21% yield,) as a colorless oil. LCMS (ESI): m/z 737.1 [M+H]^{+; 1}H NMR (400 MHz, CD₃CN) δ=9.17 (s, 1H), 7.49 (d, J=8.0 Hz, 1H), 5.91-5.77 (m, 1H), 5.65-5.54 (m, 5H), 4.49-4.26 (m, 2H), 4.23-4.07 (m, 2H), 3.92-3.55 (m, 6H), 2.71-2.61 (m, 2H), 1.24-1.16 (m, 30H); ³¹P NMR (162 MHz, CD₃CN) δ=151.59.

### Example 52: Synthesis of 102

[chemical structure]

### Example 53: Synthesis of 103

[chemical structure]

### Example 54: Synthesis of 104

[chemical structure]

### Example 55: Synthesis of 105

[chemical structure]

### Example 56

[chemical structure]

[0576] Preparation of 2: A 2 L three-necked round bottom flask equipped with magnetic stirrer and thermometer was charged with 1 (60.0 g, 228.8 mmol) in dry DMF (600.0 mL) at r.t., imidazole (95.2 g, 1.3 mol) was added into the mixture reaction, then the reaction mixture was cooled down to turn 5° C., TBSCl (76.8 g, 499.3 mmol) was added into the mixture reaction, the reaction mixture was allowed to stir for 12 h at r.t. 1 was consumed by LCMS, then the reaction mixture was added in the saturated sodium bicarbonate solution (1.0 L), after quenching the reaction, the aqueous layer was extracted with EA (400.0 mL*2), the combined organic layer was washed with saturated brine and dried over anhydrous sodium sulfate, the organic layer was concentrated to get crude 2 (110.2 g, 212.8 mmol, 93.1% yield) as a white solid, the crude product was used directly for the next step without purification. ESI-LCMS: m/z=487.3 [M+H]⁺.

[0577] Preparation of 3: A 3 L three-necked round bottom flask equipped with magnetic stirrer and thermometer was charged with 2 (117.0 g, 225.9 mmol) in THF (550.0 mL) at r.t., water (275.0 mL) was added into the mixture reaction, then the reaction mixture was cooled down to turn 0° C. and add TFA (275.0 mL) by constant pressure funnel after 4 h, the reaction mixture was allowed to stir for 2 h at 0° C. 2 was consumed by TLC. Then, reaction mixture was added in a mixture solvent of ammonium hydroxide (250.0 mL) and water (800.0 mL) at 0° C., after quenching the reaction, the aqueous layer was extracted with EA (500.0 mL*2), the combined organic layer was washed with saturated brine and dried over anhydrous sodium sulfate, the organic layer was concentrated to get crude which was purified by silica gel column chromatography (PE:EA=10:1 to 0:1) to give compound 3 (51.1 g, 59.3% yield) as a white solid. ¹H-NMR (600 MHz, DMSO-d₆): δ=11.35 (s, 1H), 7.919 (d, J=6 Hz, 1H), 5.82 (s, 1H), 5.65 (d, J=6 Hz, 1H), 5.18 (s, 1H), 4.29 (s, 1H), 3.83 (s, 2H), 3.65 (d, J=12 Hz, 1H), 3.53 (d, J=6 Hz, 1H), 3.32 (d, J=6 Hz, 1H), 0.87 (s, 9H), 0.08 (s, 6H). ESI-LCMS: m/z=373.1 [M+H]⁺.

[0578] Preparation of 4: A 3 L three-necked round bottom flask equipped with magnetic stirrer and thermometer was charged with 3 (50.0 g, 131.5 mmol) in a mixture solvent of DCM (250.0 mL) and DMF (70.0 mL) at r.t., the mixture solution was cooled down to turn 5° C., PDC (63.1 g, 164.4 mmol) and t-BuOH (200.0 mL) were added into the mixture reaction, keep the reaction at 5° C. and add Ac₂O (130.0 mL) by constant pressure funnel after 0.5 h, the reaction mixture was allowed to stir for 4 h at r.t. 3 was consumed by lc-ms, then the reaction mixture was added in the saturated sodium bicarbonate (400.0 mL), after quenching the reaction, the aqueous layer was extracted with DCM (500.0 mL*2), the combined organic layer was washed with saturated brine and dried over anhydrous sodium sulfate, the organic layer was concentrated to get crude which was purified by silica gel column chromatography (PE:EA=10:1 to 2:1) to give compound 4 (29.8 g, 50.6% yield) as a white solid. ¹H-NMR (DMSO d₆): δ=11.42 (s, 1H), 8.04 (d, J=6 Hz, 1H), 5.82 (s, 1H), 5.78 (d, J=6 Hz, 1H), 4.44 (s, 1H), 4.25 (s, 1H), 3.84 (s, 1H), 3.32 (s, 3H), 1.46 (s, 9H), 0.89 (s, 9H), 0.12 (s, 6H). ESI-LCMS: m/z=443.1 [M+H]⁺.

[0579] Preparation of 5: To a solution of 4 (33.0 g, 74.7 mmol) in dry THF (330.0 mL) was added CH₃OD (66.0 mL) and D₂O (33.0 mL) at r.t. Then the reaction mixture was added NaBD₄ (9.4 g, 224.0 mmol) three times per an hour at 50° C. The solution was stirred at 50° C. for 3 h. LCMS showed 4 was consumed. Water (300.0 mL) was added. The product was extracted with EA (2*300.0 mL). The organic layer was washed with brine and dry over by Na₂SO₄. Then the solution was concentrated under reduced pressure, crude was purified by silica gel column chromatography (PE:EA=10:1 to 3:1) to give 5 (19.1 g, 68.5% yield) as a white solid. ¹H-NMR (600 MHz, DMSO d₆): δ=11.35 (s, 1H), 7.92-7.91 (d, J=6 Hz, 1H), 5.83-5.82 (d, J=6 Hz, 1H), 5.66-5.65 (d, J=6 Hz, 1H), 5.14 (s, 1H), 4.30-4.28 (m, 1H), 3.84-3.82 (m, 2H), 3.34 (s, 3H), 0.88 (s, 9H), 0.09 (s, 6H). ESI-LCMS: m/z 375 [M+H]⁺.

[0580] Preparation of 6: To a solution of 5 (19.1 g, 51.1 mmol) in dry ACN (190.0 mL) was added Et₃N (20.7 g, 204.6 mmol) at r.t. and TMSCl (11.1 g, 102.1 mmol) at 0° C. Then the reaction mixture was stirred at r.t. for 40 min. LCMS showed 5 was consumed and an intermediate was formed. Then the solution was added DMAP (12.5 g, 102.3 mmol), Et₃N (10.3 g, 102.1 mmol) and TPSCl (23.2 g, 76.6 mmol). The reaction mixture was stirred at r.t. for 15 h. LCMS showed the intermediate was consumed and conformed another intermediate. Then was added NH₄OH (200.0 mL) and stirred at r.t. for 24 h to give the mixture of product. The product was extracted with EA (2*200.0 mL). The organic layer was washed with brine and dry over by Na₂SO₄. Then the solution was concentrated under reduced pressure, crude was purified by Flash-Prep-HPLC with the following conditions (IntelFlash-1): Column, C18 silica gel; mobile phase, CH₃CN/H₂O=1/2 increasing to CH₃CN/H₂O=1/0 within 20 min, the eluted product was collected at CH₃CN/H₂O=1/0; Detector, UV 254 nm. This resulted in to give 6 (14.0 g, 73.7% yield). ¹H-NMR (DMSO-d₆): δ=7.89-7.88 (d, J=6 Hz, 1H), 7.20-7.18 (d, J=12 Hz, 2H), 5.85-5.84 (d, J=6 Hz, 1H), 5.73-5.72 (d, J=6 Hz, 1H), 5.09 (s, 1H), 4.24-4.23 (m, 1H), 3.81-3.80 (d, J=6 Hz, 1H), 3.69-3.68 (m, 1H), 3.36 (s, 3H), 0.87 (s, 9H), 0.07 (s, 6H). ESI-LCMS: m/z 374 [M+H]⁺.

[0581] Preparation of 7: To a solution of 6 (14.0 g, 37.5 mmol) in pyridine (140.0 mL) was added TMSCl (6.3 g, 58.0 mmol) at 0° C. and the mixture was stirred at r.t. for 1.5 h. LCMS showed 6 was consumed and an intermediate(a) was formed. Then was added BzCl (10.8 g, 76.8 mmol) at 0° C. and the mixture was stirred at r.t. for 1.5 h. LCMS showed the intermediate was consumed and another intermediate was formed. Then the mixture was added NH₄OH (30.0 mL) and was stirred at r.t. for 15 h. LCMS showed the intermediate was consumed. Water (300.0 mL) was added. The solution was extracted with EA (2*200.0 mL). The organic layer was washed with brine and dry over by Na₂SO₄. Then the solution was concentrated under reduced pressure, crude was purified by Flash-Prep-HPLC with the following conditions (IntelFlash-1): Column, C18 silica gel; mobile phase, CH₃CN/H₂O=1/1 increasing to CH₃CN/H₂O=1/0 within 20 min, the eluted product was collected at CH₃CN/H₂O=1/0; Detector, UV 254 nm. This resulted in to give 7 (10.5 g, 58.6% yield). ¹H-NMR (600 MHz, DMSO d₆): δ=11.29 (s, 1H), 8.53-8.52 (d, J=6 Hz, 1H), 8.01-8.00 (d, J=6 Hz, 2H), 7.63-7.61 (m, 1H), 7.52-7.50 (m, 2H), 7.36 (s, 1H), 5.88 (s, 1H), 5.24 (s, 1H), 4.28-4.26 (m, 1H), 3.91 (s, 1H), 3.81-3.79 (m, 1H), 3.46 (s, 3H), 0.87 (s, 9H), 0.08 (s, 6H). ESI-LCMS: m/z 478 [M+H]⁺.

[0582] Preparation of 8: To a solution of 7 (10.5 g, 22.0 mmol) in DMSO (105.0 mL) was added EDCI (12.7 g, 66.0 mmol), dry pyridine (1.7 g, 22.0 mmol) at r.t. and TFA (1.3 g, 11.0 mmol) at 0° C. Then the reaction mixture was stirred for 1 h. LCMS showed 7 was consumed. Water (100.0 mL) was added. The solution was extracted with EA (2*200.0 mL). The organic layer was washed with brine and dry over by Na₂SO₄. Then the solution was concentrated under reduced pressure to give the crude product 8 which was used in next step directly. ESI-LCMS: m/z 475 [M+H]⁺.

[0583] Preparation of 9: To a solution of 8 in dry THF (120.0 mL) and D₂O (40.0 mL) was added K2CO3 (12.2 g, 88.1 mmol) and 7a (16.8 g, 26.5 mmol) then the reaction mixture was stirred for 15 h at 35° C. under the N₂ atmosphere. LCMS showed 95% 7 was consumed. Water (60.0 mL) was added. The solution was extracted with EA (2*150.0 mL). The organic layer was washed with brine and dry over by Na₂SO₄. Then the solution was concentrated under reduced pressure, crude was purified by Flash-Prep-HPLC with the following conditions (IntelFlash-1): Column, C18 silica gel; mobile phase, CH₃CN/H₂O=1/1 increasing to CH₃CN/H₂O=1/0 within 20 min, the eluted product was collected at CH₃CN/H₂O=4/1; Detector, UV 254 nm. This resulted in to give 9 (9.3 g, 54.1% yield). ¹H-NMR (DMSO-d₆) δ=11.33 (s, 1H), 8.17-8.15 (d, J=12, 1H), 8.02-8.00 (d, J=12, 1H), 7.64-7.62 (m, 1H), 7.53-7.50 (m, 2H), 7.44-7.42 (d, J=12, 1H), 4.46-4.44 (d, J=12, 1H), 4.24-4.23 (d, J=6, 1H), 3.93-3.91 (d, J=12, 1H), 1.16 (s, 18H), 0.86 (s, 9H)), 0.08-0.06 (d, J=12, 6H). ESI-LCMS: m/z 782 [M+H]⁺. ³¹P-NMR (DMSO-d₆) δ=16.77, 16.00.

[0584] Preparation of 10: 9 (9.3 g, 11.9 mmol) in the mixture solution of HOAc (140.0 mL) and H₂O (140.0 mL) was stirred at 30° C. for 15 h. LCMS showed 9 was consumed. The solution was added in the ice water and extracted with EA (2*300.0 mL). The organic layer was quenched to pH=6-7 and then washed with brine and dry over Na₂SO₄. Then the solution was concentrated under reduced, crude was purified by pressure Flash-Prep-HPLC with the following conditions (IntelFlash-1): Column, C18 silica gel; mobile phase, CH₃CN/H₂O=1/1 increasing to CH₃CN/H₂O=1/0 within 20 min, the eluted product was collected at CH₃CN/H₂O=2.5/1; Detector, UV 254 nm. This resulted in to give 10 (5.1 g, 64.6% yield). ¹H-NMR (DMSO-d₆) δ=9.09 (s, 1H), 7.92-7.85 (m, 3H), 7.60-7.48 (m, 4H), 6.02 (s, 1H), 5.71-5.64 (m, 4H), 4.53-4.51 (m, 1H), 3.94-3.70 (m, 5H), 3.31 (s, 1H), 1.21 (s, 18H). ³¹P-NMR (DMSO-d₆) δ=16.45. ESI-LCMS: m/z 668 [M+H]⁺.

[0585] Preparation of 11: To a suspension of 10 (4.6 g, 6.9 mmol) in DCM (45.0 mL) added CEOP[N(ipr)₂]₂ (2.5 g, 8.3 mmol), DCI (730.4 mg, 6.2 mmol). The mixture was stirred at r.t. for 1 h. LCMS showed 10 was consumed completely. The solution was quenched by water (40.0 mL), washed with brine (2*20.0 mL) and dry over by Na₂SO₄. Then the solution was concentrated under reduced pressure and the residue was purified by Flash-Prep-HPLC with the following conditions (IntelFlash-1): Column, C18 silica gel; mobile phase, CH₃CN/H₂O=1/1 increasing to CH₃CN/H₂O=1/0 within 20 min, the eluted product was collected at CH₃CN/H₂O=4/1; Detector, UV 254 nm. This resulted in to give 11 (4.7 g, 5.4 mmol, 78.3% yield) as a white solid. ¹H-NMR (600 MHz, DMSO-d₆) δ=11.34 (s, 1H), 8.18-8.16 (m, 1H), 8.02-8.01 (d, J=6, 2H), 7.65-7.42 (m, 4H), 5.95-5.93 (m, 1H), 5.66-5.61 (m, 4H), 4.64-4.57 (m, 1H), 4.32-4.31 (d, J=6, 1H), 4.12-4.10 (m, 1H), 3.81-3.45 (m, 7H), 2.81-2.79 (m, 2H), 1.16-1.13 (m, 30H). ³¹P-NMR (CDCl₃-d₆) 6=150.65, 150.20, 16.64, 15.41. ESI-LCMS: m/z 868 [M+H]⁺.

### Example 57

[chemical structure]

### Example 57 Scheme

[0586] Preparation of 2: 1 (94.5 g, 317.9 mmol) was dissolved in dry DMF (1000 mL) under N₂ atmosphere. To the solution TBSCl (119.3 g, 794.7 mmol) and imidazole (75.8 g, 1.1 mol) was added at 25° C. and stirred for 17 hr. LCMS showed all of 1 consumed. The reaction mixture was washed with H₂O (3000*2 mL), EA (2000*2 mL) and brine (1500 mL). Dried over Na₂SO₄ and concentrated to give crude which goes to the next step. The reaction mixture was concentrated to give crude 2 (200 g, crude). ESI-LCMS: m/z 526 [M+H]⁺.

[0587] Preparation of 3: 2 (175.1 g, 333.0 mmol) was evaporated with pyridine and dried in vacuo for two times. The residue was dissolved in pyridine (1500 mL) under N₂. To the solution, i-BuCl (88.7 g, 832.6 mmol) was added at 5° C. under N₂ atmosphere and stirred for 3 hr. LCMS showed all of 2 consumed. The reaction mixture was washed with H₂O (3000*2 mL), EA (2000*2 mL) and brine (1500 mL). Dried over Na₂SO₄ and concentrated to give crude which goes to the next step. The reaction mixture was concentrated to give crude 3 (228 g, crude). ESI-LCMS: m/z 596 [M+H]⁺.

[0588] Preparation of 4: A solution of 3 (225 g, 377.6 mmol) was in THF (2000 mL) was added H₂O (500 mL) and TFA (500 mL) was added at 5° C. Then the reaction mixture was stirred at 5° C. for 1 hr. LCMS showed all of 3 consumed. Con NH₄OH (aq) was added to mixture to quench the reaction until the pH=7-8, then washed with H₂O (2000*2 mL), EA (2000*2 mL) and brine (1500 mL). Dried over Na₂SO₄ and concentrated to give crude which was purified by cc. The reaction mixture was concentrated to give 4 (155.6 g, 83.9% yield). ESI-LCMS: m/z 482 [M+H]⁺.

[0589] Preparation of 5: 4 (100 g, 207.6 mmol) was dissolved in dry DMF (1000 mL) under N₂. To the solution, t-BuOH (307.8 g, 4.2 mol), PDC (156.1 g, 0.4 mol) and Ac₂O (212.0 g, 2.1 mol) was added at 25° C. under N₂ atmosphere and stirred at 25° C. for 2 hr. LCMS and TLC showed all of 4 consumed. NaHCO₃ (aq) was added to mixture to quench the reaction until the pH=7-8, then washed with H₂O (500*2 mL), EA (500*2 mL) and brine (500 mL). Dried over Na₂SO₄ and concentrated to give crude which was purified by cc. and MPLC. The reaction mixture was concentrated to give 5 (77.3 g, 61.6% yield,). ESI-LCMS: m/z 552 [M−H]⁺.

[0590] Preparation of 6: 5 (40.0 g, 72.6 mmol) was dissolved in dry THF (400 mL) under N₂. To the solution, MeOD (80 mL) and D₂O (40 mL) was added at 25° C. under N₂ atmosphere, then NaBD₄ (9.1 g, 217.4 mmol) was added for three times and stirred for 15 hr. LCMS and TLC showed all of 5 consumed. The mixture was concentrated to give crude which goes to the next step. The reaction mixture was concentrated to give crude 6 (30 g, crude). ESI-LCMS: m/z 414 [M+H]⁺

[0591] Preparation of 7: 6 (30 g, crude) was evaporated with pyridine and dried in vacuo for two times. The residue was dissolved in dry pyridine (300 mL) under N₂. Then iBuCl (15.5 g, 145.3 mmol) was slowly added to the reaction mixture at 0° C. under N₂ atmosphere and stirred at 25° C. for 1 hr. LCMS and TLC showed all of 6 consumed. NaHCO₃ (aq) was added to mixture to quench the reaction until the pH=7.5, then washed with H₂O (1500 mL), EA (1000*2 mL) and brine (1500 mL). Dried over Na₂SO₄ and concentrated to give crude residue R1. NaOH (8 g, 0.2 mol), MeOH (80 mL) and H₂O (20 mL) made up NaOH (aq). The residue R1 (40 g, 3.63 mmol) was dissolved in pyridine (20 mL). To the solution, 2N NaOH (aq) (100 ml) was added to the solution and stirred the reaction 15 min at 5° C. TLC showed all of R1 consumed. The mixture was added NH₄C1 to pH=7-8 at 5° C., and concentrated to give crude which was purified by cc. The product was concentrated to give 7 (15.5 g, 33.00% yield over two steps,). ESI-LCMS: m/z 484[M+H]⁺.

[0592] Preparation of 8: To a stirred solution of 7 (15.5 g, 32.1 mmol) in DMSO (150 mL) were added EDCI (18.5 g, 96.3 mmol), pyridine (2.5 g, 32.1 mmol), TFA (1.8 g, 16.0 mmol) at room temperature under N₂ atmosphere. The reaction mixture was stirred for 1 h at room temperature. The reaction was quenched with water, extracted with EA (300.0 mL), washed with brine, dried over Na₂SO₄ and evaporated under reduced pressure give a crude 8 (17.3 g, crude) which was used directly to next step. ESI-LCMS: m/z=481 [M+H]⁺.

[0593] Preparation of 10: A solution of 8 (17.3 g, crude), 9 (21.4 g, 33.7 mmol) and K2CO3 (13.3 g, 96.3 mmol) in dry THF (204 mL) and D₂O (34 mL) was stirred 5 h at 40° C. The mixture was quenched with water, extracted with EA (600.0 mL), washed with brine, dried over Na₂SO₄ and evaporated under reduced pressure. The residue was purified by silica gel (PE:EA=5:1˜1:1) to give 10 (9.3 g, 36.6% yield over 2 steps) as a white solid. ESI-LCMS m/z=787[M+H]⁺.

[0594] ¹H-NMR (DMSO-d₆): δ 11.24 (s, 1H, exchanged with D₂O), 8.74 (d, J=2.7 Hz, 2H), 8.05-8.04 (d, J=7.4 Hz, 2H), 7.65 (t, 1H), 7.57-7.54 (t, 2H), 6.20 (d, J=5.0 Hz, 1H), 5.64-5.58 (m, 4H), 4.77 (t, 1H), 4.70 (t, 1H), 4.57-4.56 (t, 1H), 3.35 (s, 3H), 1.09 (d, J=6.5 Hz, 18H), 0.93 (s, 9H), 0.15 (d, J=1.8 Hz, 6H); ³¹P NMR (DMSO-d₆): δ 17.05.

[0595] Preparation of 11: To a round-bottom flask was added 10 (9.3 g, 11.5 mmol) in a mixture of H₂O (93 mL) and HCOOH (93 mL). The reaction mixture was stirred for 5 h at 50° C. and 15 h at 35° C. The mixture was extracted with EA (500.0 mL), washed with water, NaHCO₃ solution and brine successively, dried over Na₂SO₄ and evaporated under reduced pressure. The residue was purified by Flash-Prep-HPLC with the following conditions (IntelFlash-1): Column, C18 silica gel; mobile phase, CH₃CN/H₂O (0.5% NH₄HCO₃)=1/2 increasing to CH₃CN/H₂O (0.5% NH₄HCO₃)=1/0 within 20 min, the eluted product was collected at CH₃CN/H₂O (0.5% NH₄HCO₃)=3/2; Detector, UV 254 nm. To give product 11 (6.3 g, 78% yield). ¹H-NMR (600 MHz, DMSO-d₆): δ 12.17 (s, 1H, exchanged with D₂O), 11.51 (s, 1H), 8.28 (s, 1H), 6.02-6.03 (d, J=4.2 Hz, 1H), 5.63-5.72 (m, 5H), 4.60 (s, 1H), 4.43-4.45 (m, 2H), 3.40 (s, 1H), 3.38 (s, 1H), 2.83-2.88 (m, 1H), 1.15-1.23 (m, 24H); ³¹P NMR (DMSO-d₆) δ=17.69. ESI-LCMS m/z=674 [M+H]⁺.

[0596] Preparation of 12: To a solution of 11 (5.6 g, 8.3 mmol) in DCM (55.0 mL) was added the DCI (835 mg, 7.1 mmol), then CEP[N(ipr)₂]₂ (3.3 g, 10.8 mmol) was added. The mixture was stirred at r.t. for 1 h. The reaction mixture was washed with H₂O (50.0 mL) and brine (50.0 mL), dried over Na₂SO₄ and evaporated under pressure. The residue was purified by Flash-Prep-HPLC with the following conditions (IntelFlash-1): Column, C18 silica gel; mobile phase, CH₃CN/H₂O (0.5% NH₄HCO₃)=1/1 increasing to CH₃CN/H₂O (0.5% NH₄HCO₃)=1/0 within 20 min, the eluted product was collected at CH₃CN/H₂O (0.5% NH₄HCO₃)=9/1; Detector, UV 254 nm. The product was concentrated to give 12 (6.3 g, 87% yield) as a white solid. ¹H-NMR (DMSO-d₆): δ 12.14 (s, 1H, exchanged with D₂O), 11.38 (s, 1H), 8.27-8.28 (d, J=6 Hz, 1H), 5.92-5.98 (m, 1H), 5.59-5.65 (m, 4H), 4.57-4.68 (m, 3H), 3.61-3.85 (m, 4H), 3.37 (s, 1H), 3.32 (s, 1H), 2.81-2.85 (m, 3H), 1.09-1.20 (m, 36H); ³¹P NMR (DMSO-d₆): δ 150.60, 149.97, 17.59, 17.16; ESI-LCMS m/z=874 [M+H]⁺.

### Example 58. Luciferase Reporter Assay in COS-7 Cells

[0597] All siNAs synthesized were tested for in vitro activity using a 3-point luciferase reporter assay and a subset of candidates were tested in a dose-response luciferase reporter assay.

[0598] In the psiCHECK™-2 reporter plasmid, Renilla luciferase is used as the primary reporter gene with the HSD17B13 gene (NM_178135.5) cloned downstream of its translational stop codon. A second reporter gene, firefly luciferase, is also expressed and used as a transfection control. COS-7 cells (ATCC, CRL-1651) were seeded into 96-well microplates and transfected with the reporter plasmid using Lipofectamine 3000 (Invitrogen, L3000001). The cells were then transfected with 10, 1, or 0.1 nM siNAs using Lipofectamine RNAiMAX (Invitrogen, 13778100). A mock, no-drug control, which consisted of transfecting 1×phosphate-buffered saline, was included. After 72 hours of siNA treatment, the Dual-Glo® Luciferase Assay System (Promega, E2940) was used according to the manufacturer's protocol to quantify firefly and Renilla luciferase activity. All luminescence was measured on an EnVision plate reader (Perkin Elmer). The Renilla:firefly luminescence ratio is calculated for each well. The ratios from siNA-treated wells were then normalized to ratios of the mock-treated wells and percentage inhibition was calculated. CellTiter-Glo© Luminescent Cell Viability Assays were run in parallel using similarly treated COS-7 cells. Assays were performed according to the manufacturer's protocol and luminescence is measured on an EnVision plate reader. The luminescence from siNA-treated wells were then normalized to luminescence of mock-treated wells and percentage viability was calculated.

[0599] A subset of siNA candidates were then tested in a dose-response luciferase reporter assay. Dose-response assays were similarly conducted, but instead with serial concentrations of siNAs starting at 10 nM (1:5 dilutions) for a total of nine concentrations tested for each siNA. Dose-response curves were fitted by nonlinear regression with variable slope and EC₅₀ values and maximum percentage inhibition were calculated. No siNAs exhibited significant cytotoxic effects in the COS-7 cells at the concentrations tested.

### Example 59: Identification of siRNA Sequences

[0600] In this example, potential siRNA sequences targeting the PNPLA3 I148M variant were identified. The PNPLA3 I148M RefSeq CDS (NCBI Ref. No. NM_025225.3:c.444C>G) (SEQ ID NO: 2067) was used as the starting reference sequence. PNPLA3 I148M RefSeq CDS refers to a human PNPLA3 gene, which is a variant of SEQ ID NO:1 having a single nucleotide substitution at position 444 from a C to G, and encodes a PNPLA3 protein, which is a variant of SEQ ID NO:2 having a single substitution at position 148 of the amino acid sequence which is an I148M substitution. Bioinformatics analysis was used to select target sites and design siRNA molecules with favorable on-target and off-target properties.

[0601] A subset of 19-mer and 21-mer siRNA sequences were selected for further investigation. Table 1 includes a list of certain unmodified sense strand and antisense strand 19-mer and 21-mer siRNA sequences.

[0602] To improve certain properties of the siRNAs, including, e.g., the potency and/or stability, modified variations of selected sense and antisense sequences were designed and synthesized. The modified sequences included various patterns of siRNA modifications, including, 2′-O-methyl nucleotides, 2′-fluoro nucleotides, 5′ terminal vinyl phosphonate, phosphorothioate internucleoside linkages, and UU overhangs. It will be understood that the nucleotide monomers used in the siRNA sequences are linked by 3′-5′ phosphodiester bonds unless specified otherwise. Table 2 includes a list of certain modified sense and antisense strand 19-mer and 21-mer siRNA sequences.

[0603] To the extent that a 19-mer or 21-mer includes an unpaired UU overhang at the 3′ end of the sense and/or antisense strand, the overhang is not included in the term “19-mer” or “21-mer”. Specifically, for example, a 21-mer with an unpaired UU overhang at the 3′ end of the antisense strand is called a “21-mer” despite having 23 nucleotides in the antisense strand due to the UU overhang. FIGS. 1 and 3 provide example models of a 19-mer with a UU overhang at the 3′ end of the sense strand and at the 3′ end of the antisense strand. FIGS. 2, 4 and 5 provide example models of a 21-mer with a UU overhang at the 3′ end of the antisense strand.

[0604] The present disclosure is not limited to only the specific modifications and/or patterns of modifications disclosed herein. Specifically, for example, one ordinarily skilled in the art would understand that any of the sequences listed in Table 1 could be unmodified, un-conjugated, modified, and/or conjugated, as described herein. For example, any of the siRNA molecules may comprise at least one modified nucleotide, including a vinyl phosphonate or derivative thereof (or an additional vinyl phosphonate) modification at the 3′ end and/or 5′ end of the sense and/or antisense strand, and/or may comprise a GalNAc ligand for in vivo administration as described herein.

TABLE 1
siRNA Sequences

| | | Target | Target | | | |
|---|---|---|---|---|---|---|
| siRNA | | Site Start | Site End | Sense Strand Base | | Antisense Strand Base |
| Duplex | SEQ | Position | Position | Sequence + Chem | SEQ | Sequence + Chem |
| ID NO. | ID | in SEQ ID | in SEQ ID | Modifications | ID | Modifications |
| (Dx) | NO. | NO. 2067 | NO. 2067 | (5′-3′) | NO. | (5′-3′) |
| 1 | 3 | 1 | 19 | AUGUACGACGCAGAGCGCGUU | 453 | CGCGCUCUGCGUCGUACAUUU |
| 2 | 4 | 2 | 20 | UGUACGACGCAGAGCGCGGUU | 454 | CCGCGCUCUGCGUCGUACAUU |
| 3 | 5 | 3 | 21 | GUACGACGCAGAGCGCGGCUU | 455 | GCCGCGCUCUGCGUCGUACUU |
| 4 | 6 | 5 | 23 | ACGACGCAGAGCGCGGCUGUU | 456 | CAGCCGCGCUCUGCGUCGUUU |
| 5 | 7 | 6 | 24 | CGACGCAGAGCGCGGCUGGUU | 457 | CCAGCCGCGCUCUGCGUCGUU |
| 6 | 8 | 7 | 25 | GACGCAGAGCGCGGCUGGAUU | 458 | UCCAGCCGCGCUCUGCGUCUU |
| 7 | 9 | 10 | 28 | GCAGAGCGCGGCUGGAGCUUU | 459 | AGCUCCAGCCGCGCUCUGCUU |
| 8 | 10 | 11 | 29 | CAGAGCGCGGCUGGAGCUUUU | 460 | AAGCUCCAGCCGCGCUCUGUU |
| 9 | 11 | 12 | 30 | AGAGCGCGGCUGGAGCUUGUU | 461 | CAAGCUCCAGCCGCGCUCUUU |
| 10 | 12 | 13 | 31 | GAGCGCGGCUGGAGCUUGUUU | 462 | ACAAGCUCCAGCCGCGCUCUU |
| 11 | 13 | 15 | 33 | GCGCGGCUGGAGCUUGUCCUU | 463 | GGACAAGCUCCAGCCGCGCUU |
| 12 | 14 | 16 | 34 | CGCGGCUGGAGCUUGUCCUUU | 464 | AGGACAAGCUCCAGCCGCGUU |
| 13 | 15 | 17 | 35 | GCGGCUGGAGCUUGUCCUUUU | 465 | AAGGACAAGCUCCAGCCGCUU |
| 14 | 16 | 20 | 38 | GCUGGAGCUUGUCCUUCGCUU | 466 | GCGAAGGACAAGCUCCAGCUU |
| 15 | 17 | 22 | 40 | UGGAGCUUGUCCUUCGCGGUU | 467 | CCGCGAAGGACAAGCUCCAUU |
| 16 | 18 | 23 | 41 | GGAGCUUGUCCUUCGCGGGUU | 468 | CCCGCGAAGGACAAGCUCCUU |
| 17 | 19 | 24 | 42 | GAGCUUGUCCUUCGCGGGCUU | 469 | GCCCGCGAAGGACAAGCUCUU |
| 18 | 20 | 25 | 43 | AGCUUGUCCUUCGCGGGCUUU | 470 | AGCCCGCGAAGGACAAGCUUU |
| 19 | 21 | 30 | 48 | GUCCUUCGCGGGCUGCGGCUU | 471 | GCCGCAGCCCGCGAAGGACUU |
| 20 | 22 | 41 | 59 | GCUGCGGCUUCCUGGGCUUUU | 472 | AAGCCCAGGAAGCCGCAGCUU |
| 21 | 23 | 42 | 60 | CUGCGGCUUCCUGGGCUUCUU | 473 | GAAGCCCAGGAAGCCGCAGUU |
| 22 | 24 | 45 | 63 | CGGCUUCCUGGGCUUCUACUU | 474 | GUAGAAGCCCAGGAAGCCGUU |
| 23 | 25 | 52 | 70 | CUGGGCUUCUACCACGUCGUU | 475 | CGACGUGGUAGAAGCCCAGUU |
| 24 | 26 | 53 | 71 | UGGGCUUCUACCACGUCGGUU | 476 | CCGACGUGGUAGAAGCCCAUU |
| 25 | 27 | 55 | 73 | GGCUUCUACCACGUCGGGGUU | 477 | CCCCGACGUGGUAGAAGCCUU |
| 26 | 28 | 56 | 74 | GCUUCUACCACGUCGGGGCUU | 478 | GCCCCGACGUGGUAGAAGCUU |
| 27 | 29 | 57 | 75 | CUUCUACCACGUCGGGGCGUU | 479 | CGCCCCGACGUGGUAGAAGUU |
| 28 | 30 | 58 | 76 | UUCUACCACGUCGGGGCGAUU | 480 | UCGCCCCGACGUGGUAGAAUU |
| 29 | 31 | 59 | 77 | UCUACCACGUCGGGGCGACUU | 481 | GUCGCCCCGACGUGGUAGAUU |
| 30 | 32 | 60 | 78 | CUACCACGUCGGGGCGACCUU | 482 | GGUCGCCCCGACGUGGUAGUU |
| 31 | 33 | 62 | 80 | ACCACGUCGGGGCGACCCGUU | 483 | CGGGUCGCCCCGACGUGGUUU |
| 32 | 34 | 81 | 99 | CUGCCUGAGCGAGCACGCCUU | 484 | GGCGUGCUCGCUCAGGCAGUU |
| 33 | 35 | 82 | 100 | UGCCUGAGCGAGCACGCCCUU | 485 | GGGCGUGCUCGCUCAGGCAUU |
| 34 | 36 | 84 | 102 | CCUGAGCGAGCACGCCCCGUU | 486 | CGGGGCGUGCUCGCUCAGGUU |
| 35 | 37 | 87 | 105 | GAGCGAGCACGCCCCGCACUU | 487 | GUGCGGGGCGUGCUCGCUCUU |
| 36 | 38 | 88 | 106 | AGCGAGCACGCCCCGCACCUU | 488 | GGUGCGGGGCGUGCUCGCUUU |
| 37 | 39 | 91 | 109 | GAGCACGCCCCGCACCUCCUU | 489 | GGAGGUGCGGGGCGUGCUCUU |
| 38 | 40 | 98 | 116 | CCCCGCACCUCCUCCGCGAUU | 490 | UCGCGGAGGAGGUGCGGGGUU |
| 39 | 41 | 99 | 117 | CCCGCACCUCCUCCGCGACUU | 491 | GUCGCGGAGGAGGUGCGGGUU |
| 40 | 42 | 100 | 118 | CCGCACCUCCUCCGCGACGUU | 492 | CGUCGCGGAGGAGGUGCGGUU |
| 41 | 43 | 101 | 119 | CGCACCUCCUCCGCGACGCUU | 493 | GCGUCGCGGAGGAGGUGCGUU |
| 42 | 44 | 105 | 123 | CCUCCUCCGCGACGCGCGCUU | 494 | GCGCGCGUCGCGGAGGAGGUU |
| 43 | 45 | 106 | 124 | CUCCUCCGCGACGCGCGCAUU | 495 | UGCGCGCGUCGCGGAGGAGUU |
| 44 | 46 | 107 | 125 | UCCUCCGCGACGCGCGCAUUU | 496 | AUGCGCGCGUCGCGGAGGAUU |
| 45 | 47 | 108 | 126 | CCUCCGCGACGCGCGCAUGUU | 497 | CAUGCGCGCGUCGCGGAGGUU |
| 46 | 48 | 109 | 127 | CUCCGCGACGCGCGCAUGUUU | 498 | ACAUGCGCGCGUCGCGGAGUU |
| 47 | 49 | 110 | 128 | UCCGCGACGCGCGCAUGUUUU | 499 | AACAUGCGCGCGUCGCGGAUU |
| 48 | 50 | 111 | 129 | CCGCGACGCGCGCAUGUUGUU | 500 | CAACAUGCGCGCGUCGCGGUU |
| 49 | 51 | 112 | 130 | CGCGACGCGCGCAUGUUGUUU | 501 | ACAACAUGCGCGCGUCGCGUU |
| 50 | 52 | 113 | 131 | GCGACGCGCGCAUGUUGUUUU | 502 | AACAACAUGCGCGCGUCGCUU |
| 51 | 53 | 115 | 133 | GACGCGCGCAUGUUGUUCGUU | 503 | CGAACAACAUGCGCGCGUCUU |
| 52 | 54 | 116 | 134 | ACGCGCGCAUGUUGUUCGGUU | 504 | CCGAACAACAUGCGCGCGUUU |
| 53 | 55 | 117 | 135 | CGCGCGCAUGUUGUUCGGCUU | 505 | GCCGAACAACAUGCGCGCGUU |
| 54 | 56 | 118 | 136 | GCGCGCAUGUUGUUCGGCGUU | 506 | CGCCGAACAACAUGCGCGCUU |
| 55 | 57 | 127 | 145 | UUGUUCGGCGCUUCGGCCGUU | 507 | CGGCCGAAGCGCCGAACAAUU |
| 56 | 58 | 128 | 146 | UGUUCGGCGCUUCGGCCGGUU | 508 | CCGGCCGAAGCGCCGAACAUU |
| 57 | 59 | 139 | 157 | UCGGCCGGGGCGUUGCACUUU | 509 | AGUGCAACGCCCCGGCCGAUU |
| 58 | 60 | 214 | 232 | CUUGUGCGGAAGGCCAGGAUU | 510 | UCCUGGCCUUCCGCACAAGUU |
| 59 | 61 | 216 | 234 | UGUGCGGAAGGCCAGGAGUUU | 511 | ACUCCUGGCCUUCCGCACAUU |
| 60 | 62 | 218 | 236 | UGCGGAAGGCCAGGAGUCGUU | 512 | CGACUCCUGGCCUUCCGCAUU |
| 61 | 63 | 220 | 238 | CGGAAGGCCAGGAGUCGGAUU | 513 | UCCGACUCCUGGCCUUCCGUU |
| 62 | 64 | 223 | 241 | AAGGCCAGGAGUCGGAACAUU | 514 | UGUUCCGACUCCUGGCCUUUU |
| 63 | 65 | 224 | 242 | AGGCCAGGAGUCGGAACAUUU | 515 | AUGUUCCGACUCCUGGCCUUU |
| 64 | 66 | 225 | 243 | GGCCAGGAGUCGGAACAUUUU | 516 | AAUGUUCCGACUCCUGGCCUU |
| 65 | 67 | 228 | 246 | CAGGAGUCGGAACAUUGGCUU | 517 | GCCAAUGUUCCGACUCCUGUU |
| 66 | 68 | 229 | 247 | AGGAGUCGGAACAUUGGCAUU | 518 | UGCCAAUGUUCCGACUCCUUU |
| 67 | 69 | 235 | 253 | CGGAACAUUGGCAUCUUCCUU | 519 | GGAAGAUGCCAAUGUUCCGUU |
| 68 | 70 | 238 | 256 | AACAUUGGCAUCUUCCAUCUU | 520 | GAUGGAAGAUGCCAAUGUUUU |
| 69 | 71 | 239 | 257 | ACAUUGGCAUCUUCCAUCCUU | 521 | GGAUGGAAGAUGCCAAUGUUU |
| 70 | 72 | 259 | 277 | UCCUUCAACUUAAGCAAGUUU | 522 | ACUUGCUUAAGUUGAAGGAUU |
| 71 | 73 | 261 | 279 | CUUCAACUUAAGCAAGUUCUU | 523 | GAACUUGCUUAAGUUGAAGUU |
| 72 | 74 | 302 | 320 | GCCUCCCGGCCAAUGUCCAUU | 524 | UGGACAUUGGCCGGGAGGCUU |
| 73 | 75 | 303 | 321 | CCUCCCGGCCAAUGUCCACUU | 525 | GUGGACAUUGGCCGGGAGGUU |
| 74 | 76 | 311 | 329 | CCAAUGUCCACCAGCUCAUUU | 526 | AUGAGCUGGUGGACAUUGGUU |
| 75 | 77 | 313 | 331 | AAUGUCCACCAGCUCAUCUUU | 527 | AGAUGAGCUGGUGGACAUUUU |
| 76 | 78 | 314 | 332 | AUGUCCACCAGCUCAUCUCUU | 528 | GAGAUGAGCUGGUGGACAUUU |
| 77 | 79 | 316 | 334 | GUCCACCAGCUCAUCUCCGUU | 529 | CGGAGAUGAGCUGGUGGACUU |
| 78 | 80 | 317 | 335 | UCCACCAGCUCAUCUCCGGUU | 530 | CCGGAGAUGAGCUGGUGGAUU |
| 79 | 81 | 321 | 339 | CCAGCUCAUCUCCGGCAAAUU | 531 | UUUGCCGGAGAUGAGCUGGUU |
| 80 | 82 | 343 | 361 | GGCAUCUCUCUUACCAGAGUU | 532 | CUCUGGUAAGAGAGAUGCCUU |
| 81 | 83 | 351 | 369 | UCUUACCAGAGUGUCUGAUUU | 533 | AUCAGACACUCUGGUAAGAUU |
| 82 | 84 | 352 | 370 | CUUACCAGAGUGUCUGAUGUU | 534 | CAUCAGACACUCUGGUAAGUU |
| 83 | 85 | 353 | 371 | UUACCAGAGUGUCUGAUGGUU | 535 | CCAUCAGACACUCUGGUAAUU |
| 84 | 86 | 354 | 372 | UACCAGAGUGUCUGAUGGGUU | 536 | CCCAUCAGACACUCUGGUAUU |
| 85 | 87 | 359 | 377 | GAGUGUCUGAUGGGGAAAAUU | 537 | UUUUCCCCAUCAGACACUCUU |
| 86 | 88 | 361 | 379 | GUGUCUGAUGGGGAAAACGUU | 538 | CGUUUUCCCCAUCAGACACUU |
| 87 | 89 | 362 | 380 | UGUCUGAUGGGGAAAACGUUU | 539 | ACGUUUUCCCCAUCAGACAUU |
| 88 | 90 | 363 | 381 | GUCUGAUGGGGAAAACGUUUU | 540 | AACGUUUUCCCCAUCAGACUU |
| 89 | 91 | 364 | 382 | UCUGAUGGGGAAAACGUUCUU | 541 | GAACGUUUUCCCCAUCAGAUU |
| 90 | 92 | 365 | 383 | CUGAUGGGGAAAACGUUCUUU | 542 | AGAACGUUUUCCCCAUCAGUU |
| 91 | 93 | 366 | 384 | UGAUGGGGAAAACGUUCUGUU | 543 | CAGAACGUUUUCCCCAUCAUU |
| 92 | 94 | 367 | 385 | GAUGGGGAAAACGUUCUGGUU | 544 | CCAGAACGUUUUCCCCAUCUU |
| 93 | 95 | 369 | 387 | UGGGGAAAACGUUCUGGUGUU | 545 | CACCAGAACGUUUUCCCCAUU |
| 94 | 96 | 371 | 389 | GGGAAAACGUUCUGGUGUCUU | 546 | GACACCAGAACGUUUUCCCUU |
| 95 | 97 | 372 | 390 | GGAAAACGUUCUGGUGUCUUU | 547 | AGACACCAGAACGUUUUCCUU |
| 96 | 98 | 375 | 393 | AAACGUUCUGGUGUCUGACUU | 548 | GUCAGACACCAGAACGUUUUU |
| 97 | 99 | 376 | 394 | AACGUUCUGGUGUCUGACUUU | 549 | AGUCAGACACCAGAACGUUUU |
| 98 | 100 | 377 | 395 | ACGUUCUGGUGUCUGACUUUU | 550 | AAGUCAGACACCAGAACGUUU |
| 99 | 101 | 378 | 396 | CGUUCUGGUGUCUGACUUUUU | 551 | AAAGUCAGACACCAGAACGUU |
| 100 | 102 | 379 | 397 | GUUCUGGUGUCUGACUUUCUU | 552 | GAAAGUCAGACACCAGAACUU |
| 101 | 103 | 380 | 398 | UUCUGGUGUCUGACUUUCGUU | 553 | CGAAAGUCAGACACCAGAAUU |
| 102 | 104 | 382 | 400 | CUGGUGUCUGACUUUCGGUUU | 554 | ACCGAAAGUCAGACACCAGUU |
| 103 | 105 | 383 | 401 | UGGUGUCUGACUUUCGGUCUU | 555 | GACCGAAAGUCAGACACCAUU |
| 104 | 106 | 384 | 402 | GGUGUCUGACUUUCGGUCCUU | 556 | GGACCGAAAGUCAGACACCUU |
| 105 | 107 | 385 | 403 | GUGUCUGACUUUCGGUCCAUU | 557 | UGGACCGAAAGUCAGACACUU |
| 106 | 108 | 386 | 404 | UGUCUGACUUUCGGUCCAAUU | 558 | UUGGACCGAAAGUCAGACAUU |
| 107 | 109 | 387 | 405 | GUCUGACUUUCGGUCCAAAUU | 559 | UUUGGACCGAAAGUCAGACUU |
| 108 | 110 | 398 | 416 | GGUCCAAAGACGAAGUCGUUU | 560 | ACGACUUCGUCUUUGGACCUU |
| 109 | 111 | 399 | 417 | GUCCAAAGACGAAGUCGUGUU | 561 | CACGACUUCGUCUUUGGACUU |
| 110 | 112 | 400 | 418 | UCCAAAGACGAAGUCGUGGUU | 562 | CCACGACUUCGUCUUUGGAUU |
| 111 | 113 | 401 | 419 | CCAAAGACGAAGUCGUGGAUU | 563 | UCCACGACUUCGUCUUUGGUU |
| 112 | 114 | 402 | 420 | CAAAGACGAAGUCGUGGAUUU | 564 | AUCCACGACUUCGUCUUUGUU |
| 113 | 115 | 404 | 422 | AAGACGAAGUCGUGGAUGCUU | 565 | GCAUCCACGACUUCGUCUUUU |
| 114 | 116 | 405 | 423 | AGACGAAGUCGUGGAUGCCUU | 566 | GGCAUCCACGACUUCGUCUUU |
| 115 | 117 | 406 | 424 | GACGAAGUCGUGGAUGCCUUU | 567 | AGGCAUCCACGACUUCGUCUU |
| 116 | 118 | 407 | 425 | ACGAAGUCGUGGAUGCCUUUU | 568 | AAGGCAUCCACGACUUCGUUU |
| 117 | 119 | 409 | 427 | GAAGUCGUGGAUGCCUUGGUU | 569 | CCAAGGCAUCCACGACUUCUU |
| 118 | 120 | 410 | 428 | AAGUCGUGGAUGCCUUGGUUU | 570 | ACCAAGGCAUCCACGACUUUU |
| 119 | 121 | 412 | 430 | GUCGUGGAUGCCUUGGUAUUU | 571 | AUACCAAGGCAUCCACGACUU |
| 120 | 122 | 413 | 431 | UCGUGGAUGCCUUGGUAUGUU | 572 | CAUACCAAGGCAUCCACGAUU |
| 121 | 123 | 415 | 433 | GUGGAUGCCUUGGUAUGUUUU | 573 | AACAUACCAAGGCAUCCACUU |
| 122 | 124 | 416 | 434 | UGGAUGCCUUGGUAUGUUCUU | 574 | GAACAUACCAAGGCAUCCAUU |
| 123 | 125 | 417 | 435 | GGAUGCCUUGGUAUGUUCCUU | 575 | GGAACAUACCAAGGCAUCCUU |
| 124 | 126 | 419 | 437 | AUGCCUUGGUAUGUUCCUGUU | 576 | CAGGAACAUACCAAGGCAUUU |
| 125 | 127 | 421 | 439 | GCCUUGGUAUGUUCCUGCUUU | 577 | AGCAGGAACAUACCAAGGCUU |
| 126 | 128 | 429 | 447 | AUGUUCCUGCUUCAUGCCCUU | 578 | GGGCAUGAAGCAGGAACAUUU |
| 127 | 129 | 432 | 450 | UUCCUGCUUCAUGCCCUUCUU | 579 | GAAGGGCAUGAAGCAGGAAUU |
| 128 | 130 | 433 | 451 | UCCUGCUUCAUGCCCUUCUUU | 580 | AGAAGGGCAUGAAGCAGGAUU |
| 129 | 131 | 456 | 474 | UGGCCUUAUCCCUCCUUCCUU | 581 | GGAAGGAGGGAUAAGGCCAUU |
| 130 | 132 | 461 | 479 | UUAUCCCUCCUUCCUUCAGUU | 582 | CUGAAGGAAGGAGGGAUAAUU |
| 131 | 133 | 462 | 480 | UAUCCCUCCUUCCUUCAGAUU | 583 | UCUGAAGGAAGGAGGGAUAUU |
| 132 | 134 | 466 | 484 | CCUCCUUCCUUCAGAGGCGUU | 584 | CGCCUCUGAAGGAAGGAGGUU |
| 133 | 135 | 467 | 485 | CUCCUUCCUUCAGAGGCGUUU | 585 | ACGCCUCUGAAGGAAGGAGUU |
| 134 | 136 | 469 | 487 | CCUUCCUUCAGAGGCGUGCUU | 586 | GCACGCCUCUGAAGGAAGGUU |
| 135 | 137 | 470 | 488 | CUUCCUUCAGAGGCGUGCGUU | 587 | CGCACGCCUCUGAAGGAAGUU |
| 136 | 138 | 471 | 489 | UUCCUUCAGAGGCGUGCGAUU | 588 | UCGCACGCCUCUGAAGGAAUU |
| 137 | 139 | 472 | 490 | UCCUUCAGAGGCGUGCGAUUU | 589 | AUCGCACGCCUCUGAAGGAUU |
| 138 | 140 | 473 | 491 | CCUUCAGAGGCGUGCGAUAUU | 590 | UAUCGCACGCCUCUGAAGGUU |
| 139 | 141 | 489 | 507 | AUAUGUGGAUGGAGGAGUGUU | 591 | CACUCCUCCAUCCACAUAUUU |
| 140 | 142 | 494 | 512 | UGGAUGGAGGAGUGAGUGAUU | 592 | UCACUCACUCCUCCAUCCAUU |
| 141 | 143 | 497 | 515 | AUGGAGGAGUGAGUGACAAUU | 593 | UUGUCACUCACUCCUCCAUUU |
| 142 | 144 | 501 | 519 | AGGAGUGAGUGACAACGUAUU | 594 | UACGUUGUCACUCACUCCUUU |
| 143 | 145 | 502 | 520 | GGAGUGAGUGACAACGUACUU | 595 | GUACGUUGUCACUCACUCCUU |
| 144 | 146 | 504 | 522 | AGUGAGUGACAACGUACCCUU | 596 | GGGUACGUUGUCACUCACUUU |
| 145 | 147 | 505 | 523 | GUGAGUGACAACGUACCCUUU | 597 | AGGGUACGUUGUCACUCACUU |
| 146 | 148 | 507 | 525 | GAGUGACAACGUACCCUUCUU | 598 | GAAGGGUACGUUGUCACUCUU |
| 147 | 149 | 530 | 548 | AUGCCAAAACAACCAUCACUU | 599 | GUGAUGGUUGUUUUGGCAUUU |
| 148 | 150 | 531 | 549 | UGCCAAAACAACCAUCACCUU | 600 | GGUGAUGGUUGUUUUGGCAUU |
| 149 | 151 | 532 | 550 | GCCAAAACAACCAUCACCGUU | 601 | CGGUGAUGGUUGUUUUGGCUU |
| 150 | 152 | 535 | 553 | AAAACAACCAUCACCGUGUUU | 602 | ACACGGUGAUGGUUGUUUUUU |
| 151 | 153 | 536 | 554 | AAACAACCAUCACCGUGUCUU | 603 | GACACGGUGAUGGUUGUUUUU |
| 152 | 154 | 538 | 556 | ACAACCAUCACCGUGUCCCUU | 604 | GGGACACGGUGAUGGUUGUUU |
| 153 | 155 | 539 | 557 | CAACCAUCACCGUGUCCCCUU | 605 | GGGGACACGGUGAUGGUUGUU |
| 154 | 156 | 540 | 558 | AACCAUCACCGUGUCCCCCUU | 606 | GGGGGACACGGUGAUGGUUUU |
| 155 | 157 | 546 | 564 | CACCGUGUCCCCCUUCUAUUU | 607 | AUAGAAGGGGGACACGGUGUU |
| 156 | 158 | 547 | 565 | ACCGUGUCCCCCUUCUAUGUU | 608 | CAUAGAAGGGGGACACGGUUU |
| 157 | 159 | 550 | 568 | GUGUCCCCCUUCUAUGGGGUU | 609 | CCCCAUAGAAGGGGGACACUU |
| 158 | 160 | 551 | 569 | UGUCCCCCUUCUAUGGGGAUU | 610 | UCCCCAUAGAAGGGGGACAUU |
| 159 | 161 | 552 | 570 | GUCCCCCUUCUAUGGGGAGUU | 611 | CUCCCCAUAGAAGGGGGACUU |
| 160 | 162 | 553 | 571 | UCCCCCUUCUAUGGGGAGUUU | 612 | ACUCCCCAUAGAAGGGGGAUU |
| 161 | 163 | 556 | 574 | CCCUUCUAUGGGGAGUACGUU | 613 | CGUACUCCCCAUAGAAGGGUU |
| 162 | 164 | 557 | 575 | CCUUCUAUGGGGAGUACGAUU | 614 | UCGUACUCCCCAUAGAAGGUU |
| 163 | 165 | 559 | 577 | UUCUAUGGGGAGUACGACAUU | 615 | UGUCGUACUCCCCAUAGAAUU |
| 164 | 166 | 560 | 578 | UCUAUGGGGAGUACGACAUUU | 616 | AUGUCGUACUCCCCAUAGAUU |
| 165 | 167 | 561 | 579 | CUAUGGGGAGUACGACAUCUU | 617 | GAUGUCGUACUCCCCAUAGUU |
| 166 | 168 | 562 | 580 | UAUGGGGAGUACGACAUCUUU | 618 | AGAUGUCGUACUCCCCAUAUU |
| 167 | 169 | 571 | 589 | UACGACAUCUGCCCUAAAGUU | 619 | CUUUAGGGCAGAUGUCGUAUU |
| 168 | 170 | 572 | 590 | ACGACAUCUGCCCUAAAGUUU | 620 | ACUUUAGGGCAGAUGUCGUUU |
| 169 | 171 | 573 | 591 | CGACAUCUGCCCUAAAGUCUU | 621 | GACUUUAGGGCAGAUGUCGUU |
| 170 | 172 | 574 | 592 | GACAUCUGCCCUAAAGUCAUU | 622 | UGACUUUAGGGCAGAUGUCUU |
| 171 | 173 | 575 | 593 | ACAUCUGCCCUAAAGUCAAUU | 623 | UUGACUUUAGGGCAGAUGUUU |
| 172 | 174 | 576 | 594 | CAUCUGCCCUAAAGUCAAGUU | 624 | CUUGACUUUAGGGCAGAUGUU |
| 173 | 175 | 577 | 595 | AUCUGCCCUAAAGUCAAGUUU | 625 | ACUUGACUUUAGGGCAGAUUU |
| 174 | 176 | 582 | 600 | CCCUAAAGUCAAGUCCACGUU | 626 | CGUGGACUUGACUUUAGGGUU |
| 175 | 177 | 583 | 601 | CCUAAAGUCAAGUCCACGAUU | 627 | UCGUGGACUUGACUUUAGGUU |
| 176 | 178 | 585 | 603 | UAAAGUCAAGUCCACGAACUU | 628 | GUUCGUGGACUUGACUUUAUU |
| 177 | 179 | 586 | 604 | AAAGUCAAGUCCACGAACUUU | 629 | AGUUCGUGGACUUGACUUUUU |
| 178 | 180 | 587 | 605 | AAGUCAAGUCCACGAACUUUU | 630 | AAGUUCGUGGACUUGACUUUU |
| 179 | 181 | 588 | 606 | AGUCAAGUCCACGAACUUUUU | 631 | AAAGUUCGUGGACUUGACUUU |
| 180 | 182 | 589 | 607 | GUCAAGUCCACGAACUUUCUU | 632 | GAAAGUUCGUGGACUUGACUU |
| 181 | 183 | 590 | 608 | UCAAGUCCACGAACUUUCUUU | 633 | AGAAAGUUCGUGGACUUGAUU |
| 182 | 184 | 591 | 609 | CAAGUCCACGAACUUUCUUUU | 634 | AAGAAAGUUCGUGGACUUGUU |
| 183 | 185 | 592 | 610 | AAGUCCACGAACUUUCUUCUU | 635 | GAAGAAAGUUCGUGGACUUUU |
| 184 | 186 | 593 | 611 | AGUCCACGAACUUUCUUCAUU | 636 | UGAAGAAAGUUCGUGGACUUU |
| 185 | 187 | 594 | 612 | GUCCACGAACUUUCUUCAUUU | 637 | AUGAAGAAAGUUCGUGGACUU |
| 186 | 188 | 595 | 613 | UCCACGAACUUUCUUCAUGUU | 638 | CAUGAAGAAAGUUCGUGGAUU |
| 187 | 189 | 597 | 615 | CACGAACUUUCUUCAUGUGUU | 639 | CACAUGAAGAAAGUUCGUGUU |
| 188 | 190 | 620 | 638 | UCACCAAGCUCAGUCUACGUU | 640 | CGUAGACUGAGCUUGGUGAUU |
| 189 | 191 | 621 | 639 | CACCAAGCUCAGUCUACGCUU | 641 | GCGUAGACUGAGCUUGGUGUU |
| 190 | 192 | 622 | 640 | ACCAAGCUCAGUCUACGCCUU | 642 | GGCGUAGACUGAGCUUGGUUU |
| 191 | 193 | 623 | 641 | CCAAGCUCAGUCUACGCCUUU | 643 | AGGCGUAGACUGAGCUUGGUU |
| 192 | 194 | 624 | 642 | CAAGCUCAGUCUACGCCUCUU | 644 | GAGGCGUAGACUGAGCUUGUU |
| 193 | 195 | 626 | 644 | AGCUCAGUCUACGCCUCUGUU | 645 | CAGAGGCGUAGACUGAGCUUU |
| 194 | 196 | 630 | 648 | CAGUCUACGCCUCUGCACAUU | 646 | UGUGCAGAGGCGUAGACUGUU |
| 195 | 197 | 631 | 649 | AGUCUACGCCUCUGCACAGUU | 647 | CUGUGCAGAGGCGUAGACUUU |
| 196 | 198 | 636 | 654 | ACGCCUCUGCACAGGGAACUU | 648 | GUUCCCUGUGCAGAGGCGUUU |
| 197 | 199 | 642 | 660 | CUGCACAGGGAACCUCUACUU | 649 | GUAGAGGUUCCCUGUGCAGUU |
| 198 | 200 | 643 | 661 | UGCACAGGGAACCUCUACCUU | 650 | GGUAGAGGUUCCCUGUGCAUU |
| 199 | 201 | 646 | 664 | ACAGGGAACCUCUACCUUCUU | 651 | GAAGGUAGAGGUUCCCUGUUU |
| 200 | 202 | 691 | 709 | CUCAAGGUGCUGGGAGAGAUU | 652 | UCUCUCCCAGCACCUUGAGUU |
| 201 | 203 | 694 | 712 | AAGGUGCUGGGAGAGAUAUUU | 653 | AUAUCUCUCCCAGCACCUUUU |
| 202 | 204 | 695 | 713 | AGGUGCUGGGAGAGAUAUGUU | 654 | CAUAUCUCUCCCAGCACCUUU |
| 203 | 205 | 696 | 714 | GGUGCUGGGAGAGAUAUGCUU | 655 | GCAUAUCUCUCCCAGCACCUU |
| 204 | 206 | 697 | 715 | GUGCUGGGAGAGAUAUGCCUU | 656 | GGCAUAUCUCUCCCAGCACUU |
| 205 | 207 | 698 | 716 | UGCUGGGAGAGAUAUGCCUUU | 657 | AGGCAUAUCUCUCCCAGCAUU |
| 206 | 208 | 703 | 721 | GGAGAGAUAUGCCUUCGAGUU | 658 | CUCGAAGGCAUAUCUCUCCUU |
| 207 | 209 | 735 | 753 | AUUCAGGUUCUUGGAAGAGUU | 659 | CUCUUCCAAGAACCUGAAUUU |
| 208 | 210 | 737 | 755 | UCAGGUUCUUGGAAGAGAAUU | 660 | UUCUCUUCCAAGAACCUGAUU |
| 209 | 211 | 743 | 761 | UCUUGGAAGAGAAGGGCAUUU | 661 | AUGCCCUUCUCUUCCAAGAUU |
| 210 | 212 | 744 | 762 | CUUGGAAGAGAAGGGCAUCUU | 662 | GAUGCCCUUCUCUUCCAAGUU |
| 211 | 213 | 745 | 763 | UUGGAAGAGAAGGGCAUCUUU | 663 | AGAUGCCCUUCUCUUCCAAUU |
| 212 | 214 | 747 | 765 | GGAAGAGAAGGGCAUCUGCUU | 664 | GCAGAUGCCCUUCUCUUCCUU |
| 213 | 215 | 748 | 766 | GAAGAGAAGGGCAUCUGCAUU | 665 | UGCAGAUGCCCUUCUCUUCUU |
| 214 | 216 | 749 | 767 | AAGAGAAGGGCAUCUGCAAUU | 666 | UUGCAGAUGCCCUUCUCUUUU |
| 215 | 217 | 752 | 770 | AGAAGGGCAUCUGCAACAGUU | 667 | CUGUUGCAGAUGCCCUUCUUU |
| 216 | 218 | 755 | 773 | AGGGCAUCUGCAACAGGCCUU | 668 | GGCCUGUUGCAGAUGCCCUUU |
| 217 | 219 | 758 | 776 | GCAUCUGCAACAGGCCCCAUU | 669 | UGGGGCCUGUUGCAGAUGCUU |
| 218 | 220 | 977 | 995 | CAGCACUGAGUGAAGAAAUUU | 670 | AUUUCUUCACUCAGUGCUGUU |
| 219 | 221 | 1026 | 1044 | UUGCAACUUGCUACCCAUUUU | 671 | AAUGGGUAGCAAGUUGCAAUU |
| 220 | 222 | 1035 | 1053 | GCUACCCAUUAGGAUAAUGUU | 672 | CAUUAUCCUAAUGGGUAGCUU |
| 221 | 223 | 1038 | 1056 | ACCCAUUAGGAUAAUGUCUUU | 673 | AGACAUUAUCCUAAUGGGUUU |
| 222 | 224 | 1039 | 1057 | CCCAUUAGGAUAAUGUCUUUU | 674 | AAGACAUUAUCCUAAUGGGUU |
| 223 | 225 | 1041 | 1059 | CAUUAGGAUAAUGUCUUAUUU | 675 | AUAAGACAUUAUCCUAAUGUU |
| 224 | 226 | 1064 | 1082 | UGCUGCCCUGUACCCUGCCUU | 676 | GGCAGGGUACAGGGCAGCAUU |
| 225 | 227 | 1068 | 1086 | GCCCUGUACCCUGCCUGUGUU | 677 | CACAGGCAGGGUACAGGGCUU |
| 226 | 228 | 1077 | 1095 | CCUGCCUGUGGAAUCUGCCUU | 678 | GGCAGAUUCCACAGGCAGGUU |
| 227 | 229 | 1080 | 1098 | GCCUGUGGAAUCUGCCAUUUU | 679 | AAUGGCAGAUUCCACAGGCUU |
| 228 | 230 | 1111 | 1129 | AGACUGGUGACAUGGCUUCUU | 680 | GAAGCCAUGUCACCAGUCUUU |
| 229 | 231 | 1196 | 1214 | UGUGUCUGCUCCCCGCCUCUU | 681 | GAGGCGGGGAGCAGACACAUU |
| 230 | 232 | 1198 | 1216 | UGUCUGCUCCCCGCCUCCAUU | 682 | UGGAGGCGGGGAGCAGACAUU |
| 231 | 233 | 1 | 21 | AUGUACGACGCAGAGCGCGGC | 683 | GCCGCGCUCUGCGUCGUACAUUU |
| 232 | 234 | 3 | 23 | GUACGACGCAGAGCGCGGCUG | 684 | CAGCCGCGCUCUGCGUCGUACUU |
| 233 | 235 | 4 | 24 | UACGACGCAGAGCGCGGCUGG | 685 | CCAGCCGCGCUCUGCGUCGUAUU |
| 234 | 236 | 5 | 25 | ACGACGCAGAGCGCGGCUGGA | 686 | UCCAGCCGCGCUCUGCGUCGUUU |
| 235 | 237 | 8 | 28 | ACGCAGAGCGCGGCUGGAGCU | 687 | AGCUCCAGCCGCGCUCUGCGUUU |
| 236 | 238 | 9 | 29 | CGCAGAGCGCGGCUGGAGCUU | 688 | AAGCUCCAGCCGCGCUCUGCGUU |
| 237 | 239 | 10 | 30 | GCAGAGCGCGGCUGGAGCUUG | 689 | CAAGCUCCAGCCGCGCUCUGCUU |
| 238 | 240 | 11 | 31 | CAGAGCGCGGCUGGAGCUUGU | 690 | ACAAGCUCCAGCCGCGCUCUGUU |
| 239 | 241 | 12 | 32 | AGAGCGCGGCUGGAGCUUGUC | 691 | GACAAGCUCCAGCCGCGCUCUUU |
| 240 | 242 | 13 | 33 | GAGCGCGGCUGGAGCUUGUCC | 692 | GGACAAGCUCCAGCCGCGCUCUU |
| 241 | 243 | 15 | 35 | GCGCGGCUGGAGCUUGUCCUU | 693 | AAGGACAAGCUCCAGCCGCGCUU |
| 242 | 244 | 17 | 37 | GCGGCUGGAGCUUGUCCUUCG | 694 | CGAAGGACAAGCUCCAGCCGCUU |
| 243 | 245 | 20 | 40 | GCUGGAGCUUGUCCUUCGCGG | 695 | CCGCGAAGGACAAGCUCCAGCUU |
| 244 | 246 | 22 | 42 | UGGAGCUUGUCCUUCGCGGGC | 696 | GCCCGCGAAGGACAAGCUCCAUU |
| 245 | 247 | 23 | 43 | GGAGCUUGUCCUUCGCGGGCU | 697 | AGCCCGCGAAGGACAAGCUCCUU |
| 246 | 248 | 24 | 44 | GAGCUUGUCCUUCGCGGGCUG | 698 | CAGCCCGCGAAGGACAAGCUCUU |
| 247 | 249 | 25 | 45 | AGCUUGUCCUUCGCGGGCUGC | 699 | GCAGCCCGCGAAGGACAAGCUUU |
| 248 | 250 | 28 | 48 | UUGUCCUUCGCGGGCUGCGGC | 700 | GCCGCAGCCCGCGAAGGACAAUU |
| 249 | 251 | 29 | 49 | UGUCCUUCGCGGGCUGCGGCU | 701 | AGCCGCAGCCCGCGAAGGACAUU |
| 250 | 252 | 30 | 50 | GUCCUUCGCGGGCUGCGGCUU | 702 | AAGCCGCAGCCCGCGAAGGACUU |
| 251 | 253 | 40 | 60 | GGCUGCGGCUUCCUGGGCUUC | 703 | GAAGCCCAGGAAGCCGCAGCCUU |
| 252 | 254 | 41 | 61 | GCUGCGGCUUCCUGGGCUUCU | 704 | AGAAGCCCAGGAAGCCGCAGCUU |
| 253 | 255 | 42 | 62 | CUGCGGCUUCCUGGGCUUCUA | 705 | UAGAAGCCCAGGAAGCCGCAGUU |
| 254 | 256 | 43 | 63 | UGCGGCUUCCUGGGCUUCUAC | 706 | GUAGAAGCCCAGGAAGCCGCAUU |
| 255 | 257 | 44 | 64 | GCGGCUUCCUGGGCUUCUACC | 707 | GGUAGAAGCCCAGGAAGCCGCUU |
| 256 | 258 | 48 | 68 | CUUCCUGGGCUUCUACCACGU | 708 | ACGUGGUAGAAGCCCAGGAAGUU |
| 257 | 259 | 52 | 72 | CUGGGCUUCUACCACGUCGGG | 709 | CCCGACGUGGUAGAAGCCCAGUU |
| 258 | 260 | 53 | 73 | UGGGCUUCUACCACGUCGGGG | 710 | CCCCGACGUGGUAGAAGCCCAUU |
| 259 | 261 | 55 | 75 | GGCUUCUACCACGUCGGGGCG | 711 | CGCCCCGACGUGGUAGAAGCCUU |
| 260 | 262 | 56 | 76 | GCUUCUACCACGUCGGGGCGA | 712 | UCGCCCCGACGUGGUAGAAGCUU |
| 261 | 263 | 57 | 77 | CUUCUACCACGUCGGGGCGAC | 713 | GUCGCCCCGACGUGGUAGAAGUU |
| 262 | 264 | 58 | 78 | UUCUACCACGUCGGGGCGACC | 714 | GGUCGCCCCGACGUGGUAGAAUU |
| 263 | 265 | 60 | 80 | CUACCACGUCGGGGCGACCCG | 715 | CGGGUCGCCCCGACGUGGUAGUU |
| 264 | 266 | 82 | 102 | UGCCUGAGCGAGCACGCCCCG | 716 | CGGGGCGUGCUCGCUCAGGCAUU |
| 265 | 267 | 83 | 103 | GCCUGAGCGAGCACGCCCCGC | 717 | GCGGGGCGUGCUCGCUCAGGCUU |
| 266 | 268 | 86 | 106 | UGAGCGAGCACGCCCCGCACC | 718 | GGUGCGGGGCGUGCUCGCUCAUU |
| 267 | 269 | 88 | 108 | AGCGAGCACGCCCCGCACCUC | 719 | GAGGUGCGGGGCGUGCUCGCUUU |
| 268 | 270 | 89 | 109 | GCGAGCACGCCCCGCACCUCC | 720 | GGAGGUGCGGGGCGUGCUCGCUU |
| 269 | 271 | 91 | 111 | GAGCACGCCCCGCACCUCCUC | 721 | GAGGAGGUGCGGGGCGUGCUCUU |
| 270 | 272 | 96 | 116 | CGCCCCGCACCUCCUCCGCGA | 722 | UCGCGGAGGAGGUGCGGGGCGUU |
| 271 | 273 | 97 | 117 | GCCCCGCACCUCCUCCGCGAC | 723 | GUCGCGGAGGAGGUGCGGGGCUU |
| 272 | 274 | 98 | 118 | CCCCGCACCUCCUCCGCGACG | 724 | CGUCGCGGAGGAGGUGCGGGGUU |
| 273 | 275 | 99 | 119 | CCCGCACCUCCUCCGCGACGC | 725 | GCGUCGCGGAGGAGGUGCGGGUU |
| 274 | 276 | 100 | 120 | CCGCACCUCCUCCGCGACGCG | 726 | CGCGUCGCGGAGGAGGUGCGGUU |
| 275 | 277 | 101 | 121 | CGCACCUCCUCCGCGACGCGC | 727 | GCGCGUCGCGGAGGAGGUGCGUU |
| 276 | 278 | 103 | 123 | CACCUCCUCCGCGACGCGCGC | 728 | GCGCGCGUCGCGGAGGAGGUGUU |
| 277 | 279 | 105 | 125 | CCUCCUCCGCGACGCGCGCAU | 729 | AUGCGCGCGUCGCGGAGGAGGUU |
| 278 | 280 | 106 | 126 | CUCCUCCGCGACGCGCGCAUG | 730 | CAUGCGCGCGUCGCGGAGGAGUU |
| 279 | 281 | 107 | 127 | UCCUCCGCGACGCGCGCAUGU | 731 | ACAUGCGCGCGUCGCGGAGGAUU |
| 280 | 282 | 108 | 128 | CCUCCGCGACGCGCGCAUGUU | 732 | AACAUGCGCGCGUCGCGGAGGUU |
| 281 | 283 | 109 | 129 | CUCCGCGACGCGCGCAUGUUG | 733 | CAACAUGCGCGCGUCGCGGAGUU |
| 282 | 284 | 110 | 130 | UCCGCGACGCGCGCAUGUUGU | 734 | ACAACAUGCGCGCGUCGCGGAUU |
| 283 | 285 | 111 | 131 | CCGCGACGCGCGCAUGUUGUU | 735 | AACAACAUGCGCGCGUCGCGGUU |
| 284 | 286 | 113 | 133 | GCGACGCGCGCAUGUUGUUCG | 736 | CGAACAACAUGCGCGCGUCGCUU |
| 285 | 287 | 114 | 134 | CGACGCGCGCAUGUUGUUCGG | 737 | CCGAACAACAUGCGCGCGUCGUU |
| 286 | 288 | 115 | 135 | GACGCGCGCAUGUUGUUCGGC | 738 | GCCGAACAACAUGCGCGCGUCUU |
| 287 | 289 | 213 | 233 | UCUUGUGCGGAAGGCCAGGAG | 739 | CUCCUGGCCUUCCGCACAAGAUU |
| 288 | 290 | 214 | 234 | CUUGUGCGGAAGGCCAGGAGU | 740 | ACUCCUGGCCUUCCGCACAAGUU |
| 289 | 291 | 216 | 236 | UGUGCGGAAGGCCAGGAGUCG | 741 | CGACUCCUGGCCUUCCGCACAUU |
| 290 | 292 | 218 | 238 | UGCGGAAGGCCAGGAGUCGGA | 742 | UCCGACUCCUGGCCUUCCGCAUU |
| 291 | 293 | 220 | 240 | CGGAAGGCCAGGAGUCGGAAC | 743 | GUUCCGACUCCUGGCCUUCCGUU |
| 292 | 294 | 223 | 243 | AAGGCCAGGAGUCGGAACAUU | 744 | AAUGUUCCGACUCCUGGCCUUUU |
| 293 | 295 | 224 | 244 | AGGCCAGGAGUCGGAACAUUG | 745 | CAAUGUUCCGACUCCUGGCCUUU |
| 294 | 296 | 225 | 245 | GGCCAGGAGUCGGAACAUUGG | 746 | CCAAUGUUCCGACUCCUGGCCUU |
| 295 | 297 | 229 | 249 | AGGAGUCGGAACAUUGGCAUC | 747 | GAUGCCAAUGUUCCGACUCCUUU |
| 296 | 298 | 311 | 331 | CCAAUGUCCACCAGCUCAUCU | 748 | AGAUGAGCUGGUGGACAUUGGUU |
| 297 | 299 | 312 | 332 | CAAUGUCCACCAGCUCAUCUC | 749 | GAGAUGAGCUGGUGGACAUUGUU |
| 298 | 300 | 314 | 334 | AUGUCCACCAGCUCAUCUCCG | 750 | CGGAGAUGAGCUGGUGGACAUUU |
| 299 | 301 | 315 | 335 | UGUCCACCAGCUCAUCUCCGG | 751 | CCGGAGAUGAGCUGGUGGACAUU |
| 300 | 302 | 316 | 336 | GUCCACCAGCUCAUCUCCGGC | 752 | GCCGGAGAUGAGCUGGUGGACUU |
| 301 | 303 | 317 | 337 | UCCACCAGCUCAUCUCCGGCA | 753 | UGCCGGAGAUGAGCUGGUGGAUU |
| 302 | 304 | 319 | 339 | CACCAGCUCAUCUCCGGCAAA | 754 | UUUGCCGGAGAUGAGCUGGUGUU |
| 303 | 305 | 351 | 371 | UCUUACCAGAGUGUCUGAUGG | 755 | CCAUCAGACACUCUGGUAAGAUU |
| 304 | 306 | 352 | 372 | CUUACCAGAGUGUCUGAUGGG | 756 | CCCAUCAGACACUCUGGUAAGUU |
| 305 | 307 | 353 | 373 | UUACCAGAGUGUCUGAUGGGG | 757 | CCCCAUCAGACACUCUGGUAAUU |
| 306 | 308 | 354 | 374 | UACCAGAGUGUCUGAUGGGGA | 758 | UCCCCAUCAGACACUCUGGUAUU |
| 307 | 309 | 357 | 377 | CAGAGUGUCUGAUGGGGAAAA | 759 | UUUUCCCCAUCAGACACUCUGUU |
| 308 | 310 | 358 | 378 | AGAGUGUCUGAUGGGGAAAAC | 760 | GUUUUCCCCAUCAGACACUCUUU |
| 309 | 311 | 359 | 379 | GAGUGUCUGAUGGGGAAAACG | 761 | CGUUUUCCCCAUCAGACACUCUU |
| 310 | 312 | 360 | 380 | AGUGUCUGAUGGGGAAAACGU | 762 | ACGUUUUCCCCAUCAGACACUUU |
| 311 | 313 | 361 | 381 | GUGUCUGAUGGGGAAAACGUU | 763 | AACGUUUUCCCCAUCAGACACUU |
| 312 | 314 | 362 | 382 | UGUCUGAUGGGGAAAACGUUC | 764 | GAACGUUUUCCCCAUCAGACAUU |
| 313 | 315 | 363 | 383 | GUCUGAUGGGGAAAACGUUCU | 765 | AGAACGUUUUCCCCAUCAGACUU |
| 314 | 316 | 364 | 384 | UCUGAUGGGGAAAACGUUCUG | 766 | CAGAACGUUUUCCCCAUCAGAUU |
| 315 | 317 | 365 | 385 | CUGAUGGGGAAAACGUUCUGG | 767 | CCAGAACGUUUUCCCCAUCAGUU |
| 316 | 318 | 366 | 386 | UGAUGGGGAAAACGUUCUGGU | 768 | ACCAGAACGUUUUCCCCAUCAUU |
| 317 | 319 | 367 | 387 | GAUGGGGAAAACGUUCUGGUG | 769 | CACCAGAACGUUUUCCCCAUCUU |
| 318 | 320 | 369 | 389 | UGGGGAAAACGUUCUGGUGUC | 770 | GACACCAGAACGUUUUCCCCAUU |
| 319 | 321 | 371 | 391 | GGGAAAACGUUCUGGUGUCUG | 771 | CAGACACCAGAACGUUUUCCCUU |
| 320 | 322 | 372 | 392 | GGAAAACGUUCUGGUGUCUGA | 772 | UCAGACACCAGAACGUUUUCCUU |
| 321 | 323 | 375 | 395 | AAACGUUCUGGUGUCUGACUU | 773 | AAGUCAGACACCAGAACGUUUUU |
| 322 | 324 | 376 | 396 | AACGUUCUGGUGUCUGACUUU | 774 | AAAGUCAGACACCAGAACGUUUU |
| 323 | 325 | 377 | 397 | ACGUUCUGGUGUCUGACUUUC | 775 | GAAAGUCAGACACCAGAACGUUU |
| 324 | 326 | 378 | 398 | CGUUCUGGUGUCUGACUUUCG | 776 | CGAAAGUCAGACACCAGAACGUU |
| 325 | 327 | 382 | 402 | CUGGUGUCUGACUUUCGGUCC | 777 | GGACCGAAAGUCAGACACCAGUU |
| 326 | 328 | 383 | 403 | UGGUGUCUGACUUUCGGUCCA | 778 | UGGACCGAAAGUCAGACACCAUU |
| 327 | 329 | 384 | 404 | GGUGUCUGACUUUCGGUCCAA | 779 | UUGGACCGAAAGUCAGACACCUU |
| 328 | 330 | 385 | 405 | GUGUCUGACUUUCGGUCCAAA | 780 | UUUGGACCGAAAGUCAGACACUU |
| 329 | 331 | 387 | 407 | GUCUGACUUUCGGUCCAAAGA | 781 | UCUUUGGACCGAAAGUCAGACUU |
| 330 | 332 | 388 | 408 | UCUGACUUUCGGUCCAAAGAC | 782 | GUCUUUGGACCGAAAGUCAGAUU |
| 331 | 333 | 398 | 418 | GGUCCAAAGACGAAGUCGUGG | 783 | CCACGACUUCGUCUUUGGACCUU |
| 332 | 334 | 399 | 419 | GUCCAAAGACGAAGUCGUGGA | 784 | UCCACGACUUCGUCUUUGGACUU |
| 333 | 335 | 400 | 420 | UCCAAAGACGAAGUCGUGGAU | 785 | AUCCACGACUUCGUCUUUGGAUU |
| 334 | 336 | 402 | 422 | CAAAGACGAAGUCGUGGAUGC | 786 | GCAUCCACGACUUCGUCUUUGUU |
| 335 | 337 | 403 | 423 | AAAGACGAAGUCGUGGAUGCC | 787 | GGCAUCCACGACUUCGUCUUUUU |
| 336 | 338 | 404 | 424 | AAGACGAAGUCGUGGAUGCCU | 788 | AGGCAUCCACGACUUCGUCUUUU |
| 337 | 339 | 405 | 425 | AGACGAAGUCGUGGAUGCCUU | 789 | AAGGCAUCCACGACUUCGUCUUU |
| 338 | 340 | 407 | 427 | ACGAAGUCGUGGAUGCCUUGG | 790 | CCAAGGCAUCCACGACUUCGUUU |
| 339 | 341 | 408 | 428 | CGAAGUCGUGGAUGCCUUGGU | 791 | ACCAAGGCAUCCACGACUUCGUU |
| 340 | 342 | 409 | 429 | GAAGUCGUGGAUGCCUUGGUA | 792 | UACCAAGGCAUCCACGACUUCUU |
| 341 | 343 | 410 | 430 | AAGUCGUGGAUGCCUUGGUAU | 793 | AUACCAAGGCAUCCACGACUUUU |
| 342 | 344 | 412 | 432 | GUCGUGGAUGCCUUGGUAUGU | 794 | ACAUACCAAGGCAUCCACGACUU |
| 343 | 345 | 413 | 433 | UCGUGGAUGCCUUGGUAUGUU | 795 | AACAUACCAAGGCAUCCACGAUU |
| 344 | 346 | 415 | 435 | GUGGAUGCCUUGGUAUGUUCC | 796 | GGAACAUACCAAGGCAUCCACUU |
| 345 | 347 | 416 | 436 | UGGAUGCCUUGGUAUGUUCCU | 797 | AGGAACAUACCAAGGCAUCCAUU |
| 346 | 348 | 417 | 437 | GGAUGCCUUGGUAUGUUCCUG | 798 | CAGGAACAUACCAAGGCAUCCUU |
| 347 | 349 | 419 | 439 | AUGCCUUGGUAUGUUCCUGCU | 799 | AGCAGGAACAUACCAAGGCAUUU |
| 348 | 350 | 421 | 441 | GCCUUGGUAUGUUCCUGCUUC | 800 | GAAGCAGGAACAUACCAAGGCUU |
| 349 | 351 | 430 | 450 | UGUUCCUGCUUCAUGCCCUUC | 801 | GAAGGGCAUGAAGCAGGAACAUU |
| 350 | 352 | 433 | 453 | UCCUGCUUCAUGCCCUUCUAC | 802 | GUAGAAGGGCAUGAAGCAGGAUU |
| 351 | 353 | 454 | 474 | AGUGGCCUUAUCCCUCCUUCC | 803 | GGAAGGAGGGAUAAGGCCACUUU |
| 352 | 354 | 457 | 477 | GGCCUUAUCCCUCCUUCCUUC | 804 | GAAGGAAGGAGGGAUAAGGCCUU |
| 353 | 355 | 459 | 479 | CCUUAUCCCUCCUUCCUUCAG | 805 | CUGAAGGAAGGAGGGAUAAGGUU |
| 354 | 356 | 460 | 480 | CUUAUCCCUCCUUCCUUCAGA | 806 | UCUGAAGGAAGGAGGGAUAAGUU |
| 355 | 357 | 461 | 481 | UUAUCCCUCCUUCCUUCAGAG | 807 | CUCUGAAGGAAGGAGGGAUAAUU |
| 356 | 358 | 465 | 485 | CCCUCCUUCCUUCAGAGGCGU | 808 | ACGCCUCUGAAGGAAGGAGGGUU |
| 357 | 359 | 466 | 486 | CCUCCUUCCUUCAGAGGCGUG | 809 | CACGCCUCUGAAGGAAGGAGGUU |
| 358 | 360 | 467 | 487 | CUCCUUCCUUCAGAGGCGUGC | 810 | GCACGCCUCUGAAGGAAGGAGUU |
| 359 | 361 | 469 | 489 | CCUUCCUUCAGAGGCGUGCGA | 811 | UCGCACGCCUCUGAAGGAAGGUU |
| 360 | 362 | 470 | 490 | CUUCCUUCAGAGGCGUGCGAU | 812 | AUCGCACGCCUCUGAAGGAAGUU |
| 361 | 363 | 471 | 491 | UUCCUUCAGAGGCGUGCGAUA | 813 | UAUCGCACGCCUCUGAAGGAAUU |
| 362 | 364 | 489 | 509 | AUAUGUGGAUGGAGGAGUGAG | 814 | CUCACUCCUCCAUCCACAUAUUU |
| 363 | 365 | 499 | 519 | GGAGGAGUGAGUGACAACGUA | 815 | UACGUUGUCACUCACUCCUCCUU |
| 364 | 366 | 501 | 521 | AGGAGUGAGUGACAACGUACC | 816 | GGUACGUUGUCACUCACUCCUUU |
| 365 | 367 | 502 | 522 | GGAGUGAGUGACAACGUACCC | 817 | GGGUACGUUGUCACUCACUCCUU |
| 366 | 368 | 505 | 525 | GUGAGUGACAACGUACCCUUC | 818 | GAAGGGUACGUUGUCACUCACUU |
| 367 | 369 | 528 | 548 | UGAUGCCAAAACAACCAUCAC | 819 | GUGAUGGUUGUUUUGGCAUCAUU |
| 368 | 370 | 529 | 549 | GAUGCCAAAACAACCAUCACC | 820 | GGUGAUGGUUGUUUUGGCAUCUU |
| 369 | 371 | 530 | 550 | AUGCCAAAACAACCAUCACCG | 821 | CGGUGAUGGUUGUUUUGGCAUUU |
| 370 | 372 | 533 | 553 | CCAAAACAACCAUCACCGUGU | 822 | ACACGGUGAUGGUUGUUUUGGUU |
| 371 | 373 | 534 | 554 | CAAAACAACCAUCACCGUGUC | 823 | GACACGGUGAUGGUUGUUUUGUU |
| 372 | 374 | 536 | 556 | AAACAACCAUCACCGUGUCCC | 824 | GGGACACGGUGAUGGUUGUUUUU |
| 373 | 375 | 537 | 557 | AACAACCAUCACCGUGUCCCC | 825 | GGGGACACGGUGAUGGUUGUUUU |
| 374 | 376 | 538 | 558 | ACAACCAUCACCGUGUCCCCC | 826 | GGGGGACACGGUGAUGGUUGUUU |
| 375 | 377 | 539 | 559 | CAACCAUCACCGUGUCCCCCU | 827 | AGGGGGACACGGUGAUGGUUGUU |
| 376 | 378 | 544 | 564 | AUCACCGUGUCCCCCUUCUAU | 828 | AUAGAAGGGGGACACGGUGAUUU |
| 377 | 379 | 545 | 565 | UCACCGUGUCCCCCUUCUAUG | 829 | CAUAGAAGGGGGACACGGUGAUU |
| 378 | 380 | 546 | 566 | CACCGUGUCCCCCUUCUAUGG | 830 | CCAUAGAAGGGGGACACGGUGUU |
| 379 | 381 | 547 | 567 | ACCGUGUCCCCCUUCUAUGGG | 831 | CCCAUAGAAGGGGGACACGGUUU |
| 380 | 382 | 550 | 570 | GUGUCCCCCUUCUAUGGGGAG | 832 | CUCCCCAUAGAAGGGGGACACUU |
| 381 | 383 | 551 | 571 | UGUCCCCCUUCUAUGGGGAGU | 833 | ACUCCCCAUAGAAGGGGGACAUU |
| 382 | 384 | 552 | 572 | GUCCCCCUUCUAUGGGGAGUA | 834 | UACUCCCCAUAGAAGGGGGACUU |
| 383 | 385 | 553 | 573 | UCCCCCUUCUAUGGGGAGUAC | 835 | GUACUCCCCAUAGAAGGGGGAUU |
| 384 | 386 | 556 | 576 | CCCUUCUAUGGGGAGUACGAC | 836 | GUCGUACUCCCCAUAGAAGGGUU |
| 385 | 387 | 557 | 577 | CCUUCUAUGGGGAGUACGACA | 837 | UGUCGUACUCCCCAUAGAAGGUU |
| 386 | 388 | 559 | 579 | UUCUAUGGGGAGUACGACAUC | 838 | GAUGUCGUACUCCCCAUAGAAUU |
| 387 | 389 | 560 | 580 | UCUAUGGGGAGUACGACAUCU | 839 | AGAUGUCGUACUCCCCAUAGAUU |
| 388 | 390 | 561 | 581 | CUAUGGGGAGUACGACAUCUG | 840 | CAGAUGUCGUACUCCCCAUAGUU |
| 389 | 391 | 562 | 582 | UAUGGGGAGUACGACAUCUGC | 841 | GCAGAUGUCGUACUCCCCAUAUU |
| 390 | 392 | 572 | 592 | ACGACAUCUGCCCUAAAGUCA | 842 | UGACUUUAGGGCAGAUGUCGUUU |
| 391 | 393 | 573 | 593 | CGACAUCUGCCCUAAAGUCAA | 843 | UUGACUUUAGGGCAGAUGUCGUU |
| 392 | 394 | 574 | 594 | GACAUCUGCCCUAAAGUCAAG | 844 | CUUGACUUUAGGGCAGAUGUCUU |
| 393 | 395 | 575 | 595 | ACAUCUGCCCUAAAGUCAAGU | 845 | ACUUGACUUUAGGGCAGAUGUUU |
| 394 | 396 | 576 | 596 | CAUCUGCCCUAAAGUCAAGUC | 846 | GACUUGACUUUAGGGCAGAUGUU |
| 395 | 397 | 577 | 597 | AUCUGCCCUAAAGUCAAGUCC | 847 | GGACUUGACUUUAGGGCAGAUUU |
| 396 | 398 | 582 | 602 | CCCUAAAGUCAAGUCCACGAA | 848 | UUCGUGGACUUGACUUUAGGGUU |
| 397 | 399 | 583 | 603 | CCUAAAGUCAAGUCCACGAAC | 849 | GUUCGUGGACUUGACUUUAGGUU |
| 398 | 400 | 585 | 605 | UAAAGUCAAGUCCACGAACUU | 850 | AAGUUCGUGGACUUGACUUUAUU |
| 399 | 401 | 586 | 606 | AAAGUCAAGUCCACGAACUUU | 851 | AAAGUUCGUGGACUUGACUUUUU |
| 400 | 402 | 587 | 607 | AAGUCAAGUCCACGAACUUUC | 852 | GAAAGUUCGUGGACUUGACUUUU |
| 401 | 403 | 588 | 608 | AGUCAAGUCCACGAACUUUCU | 853 | AGAAAGUUCGUGGACUUGACUUU |
| 402 | 404 | 589 | 609 | GUCAAGUCCACGAACUUUCUU | 854 | AAGAAAGUUCGUGGACUUGACUU |
| 403 | 405 | 590 | 610 | UCAAGUCCACGAACUUUCUUC | 855 | GAAGAAAGUUCGUGGACUUGAUU |
| 404 | 406 | 591 | 611 | CAAGUCCACGAACUUUCUUCA | 856 | UGAAGAAAGUUCGUGGACUUGUU |
| 405 | 407 | 592 | 612 | AAGUCCACGAACUUUCUUCAU | 857 | AUGAAGAAAGUUCGUGGACUUUU |
| 406 | 408 | 593 | 613 | AGUCCACGAACUUUCUUCAUG | 858 | CAUGAAGAAAGUUCGUGGACUUU |
| 407 | 409 | 595 | 615 | UCCACGAACUUUCUUCAUGUG | 859 | CACAUGAAGAAAGUUCGUGGAUU |
| 408 | 410 | 618 | 638 | CAUCACCAAGCUCAGUCUACG | 860 | CGUAGACUGAGCUUGGUGAUGUU |
| 409 | 411 | 619 | 639 | AUCACCAAGCUCAGUCUACGC | 861 | GCGUAGACUGAGCUUGGUGAUUU |
| 410 | 412 | 620 | 640 | UCACCAAGCUCAGUCUACGCC | 862 | GGCGUAGACUGAGCUUGGUGAUU |
| 411 | 413 | 621 | 641 | CACCAAGCUCAGUCUACGCCU | 863 | AGGCGUAGACUGAGCUUGGUGUU |
| 412 | 414 | 622 | 642 | ACCAAGCUCAGUCUACGCCUC | 864 | GAGGCGUAGACUGAGCUUGGUUU |
| 413 | 415 | 623 | 643 | CCAAGCUCAGUCUACGCCUCU | 865 | AGAGGCGUAGACUGAGCUUGGUU |
| 414 | 416 | 624 | 644 | CAAGCUCAGUCUACGCCUCUG | 866 | CAGAGGCGUAGACUGAGCUUGUU |
| 415 | 417 | 628 | 648 | CUCAGUCUACGCCUCUGCACA | 867 | UGUGCAGAGGCGUAGACUGAGUU |
| 416 | 418 | 629 | 649 | UCAGUCUACGCCUCUGCACAG | 868 | CUGUGCAGAGGCGUAGACUGAUU |
| 417 | 419 | 630 | 650 | CAGUCUACGCCUCUGCACAGG | 869 | CCUGUGCAGAGGCGUAGACUGUU |
| 418 | 420 | 636 | 656 | ACGCCUCUGCACAGGGAACCU | 870 | AGGUUCCCUGUGCAGAGGCGUUU |
| 419 | 421 | 637 | 657 | CGCCUCUGCACAGGGAACCUC | 871 | GAGGUUCCCUGUGCAGAGGCGUU |
| 420 | 422 | 638 | 658 | GCCUCUGCACAGGGAACCUCU | 872 | AGAGGUUCCCUGUGCAGAGGCUU |
| 421 | 423 | 640 | 660 | CUCUGCACAGGGAACCUCUAC | 873 | GUAGAGGUUCCCUGUGCAGAGUU |
| 422 | 424 | 641 | 661 | UCUGCACAGGGAACCUCUACC | 874 | GGUAGAGGUUCCCUGUGCAGAUU |
| 423 | 425 | 644 | 664 | GCACAGGGAACCUCUACCUUC | 875 | GAAGGUAGAGGUUCCCUGUGCUU |
| 424 | 426 | 645 | 665 | CACAGGGAACCUCUACCUUCU | 876 | AGAAGGUAGAGGUUCCCUGUGUU |
| 425 | 427 | 694 | 714 | AAGGUGCUGGGAGAGAUAUGC | 877 | GCAUAUCUCUCCCAGCACCUUUU |
| 426 | 428 | 695 | 715 | AGGUGCUGGGAGAGAUAUGCC | 878 | GGCAUAUCUCUCCCAGCACCUUU |
| 427 | 429 | 696 | 716 | GGUGCUGGGAGAGAUAUGCCU | 879 | AGGCAUAUCUCUCCCAGCACCUU |
| 428 | 430 | 697 | 717 | GUGCUGGGAGAGAUAUGCCUU | 880 | AAGGCAUAUCUCUCCCAGCACUU |
| 429 | 431 | 735 | 755 | AUUCAGGUUCUUGGAAGAGAA | 881 | UUCUCUUCCAAGAACCUGAAUUU |
| 430 | 432 | 741 | 761 | GUUCUUGGAAGAGAAGGGCAU | 882 | AUGCCCUUCUCUUCCAAGAACUU |
| 431 | 433 | 742 | 762 | UUCUUGGAAGAGAAGGGCAUC | 883 | GAUGCCCUUCUCUUCCAAGAAUU |
| 432 | 434 | 743 | 763 | UCUUGGAAGAGAAGGGCAUCU | 884 | AGAUGCCCUUCUCUUCCAAGAUU |
| 433 | 435 | 744 | 764 | CUUGGAAGAGAAGGGCAUCUG | 885 | CAGAUGCCCUUCUCUUCCAAGUU |
| 434 | 436 | 745 | 765 | UUGGAAGAGAAGGGCAUCUGC | 886 | GCAGAUGCCCUUCUCUUCCAAUU |
| 435 | 437 | 747 | 767 | GGAAGAGAAGGGCAUCUGCAA | 887 | UUGCAGAUGCCCUUCUCUUCCUU |
| 436 | 438 | 748 | 768 | GAAGAGAAGGGCAUCUGCAAC | 888 | GUUGCAGAUGCCCUUCUCUUCUU |
| 437 | 439 | 749 | 769 | AAGAGAAGGGCAUCUGCAACA | 889 | UGUUGCAGAUGCCCUUCUCUUUU |
| 438 | 440 | 752 | 772 | AGAAGGGCAUCUGCAACAGGC | 890 | GCCUGUUGCAGAUGCCCUUCUUU |
| 439 | 441 | 753 | 773 | GAAGGGCAUCUGCAACAGGCC | 891 | GGCCUGUUGCAGAUGCCCUUCUU |
| 440 | 442 | 758 | 778 | GCAUCUGCAACAGGCCCCAGC | 892 | GCUGGGGCCUGUUGCAGAUGCUU |
| 441 | 443 | 1026 | 1046 | UUGCAACUUGCUACCCAUUAG | 893 | CUAAUGGGUAGCAAGUUGCAAUU |
| 442 | 444 | 1039 | 1059 | CCCAUUAGGAUAAUGUCUUAU | 894 | AUAAGACAUUAUCCUAAUGGGUU |
| 443 | 445 | 1062 | 1082 | AAUGCUGCCCUGUACCCUGCC | 895 | GGCAGGGUACAGGGCAGCAUUUU |
| 444 | 446 | 1067 | 1087 | UGCCCUGUACCCUGCCUGUGG | 896 | CCACAGGCAGGGUACAGGGCAUU |
| 445 | 447 | 1068 | 1088 | GCCCUGUACCCUGCCUGUGGA | 897 | UCCACAGGCAGGGUACAGGGCUU |
| 446 | 448 | 1077 | 1097 | CCUGCCUGUGGAAUCUGCCAU | 898 | AUGGCAGAUUCCACAGGCAGGUU |
| 447 | 449 | 1080 | 1100 | GCCUGUGGAAUCUGCCAUUGC | 899 | GCAAUGGCAGAUUCCACAGGCUU |
| 448 | 450 | 1159 | 1179 | CAGUGGGUGACCUCACAGGUG | 900 | CACCUGUGAGGUCACCCACUGUU |
| 449 | 451 | 1195 | 1215 | AUGUGUCUGCUCCCCGCCUCC | 901 | GGAGGCGGGGAGCAGACACAUUU |
| 450 | 452 | 1196 | 1216 | UGUGUCUGCUCCCCGCCUCCA | 902 | UGGAGGCGGGGAGCAGACACAUU |
| 451 | 2068 | 419 | 437 | AUGCCUUGGUAUGUUCCUG | 2108 | CAGGAACAUACCAAGGCAUUU |
| 452 | 2069 | 419 | 437 | AUGCCUUGGUAUGUUCCUG | 2109 | AAGGAACAUACCAAGGCAUUU |
| 453 | 2070 | 419 | 437 | AUGCCUUGGUAUGUUCCUG | 2110 | AAGGAACAUACCAAGGCAUUU |
| 454 | 2071 | 419 | 437 | AUGCCUUGGUAUGUUCCUG | 2111 | UAGGAACAUACCAAGGCAUUU |
| 455 | 2072 | 419 | 437 | AUGCCUUGGUAUGUUCCUG | 2112 | UAGGAACAUACCAAGGCAUUU |
| 456 | 2073 | 419 | 437 | AUGCCUUGGUAUGUUCCUG | 2113 | CAGGAACAUACCAAGGCAUCC |
| 457 | 2074 | 419 | 437 | AUGCCUUGGUAUGUUCCUG | 2114 | AAGGAACAUACCAAGGCAUCC |
| 458 | 2075 | 419 | 439 | AUGCCUUGGUAUGUUCCUGCU | 2115 | AGCAGGAACAUACCAAGGCAUCC |
| 459 | 2076 | 417 | 437 | GGAUGCCUUGGUAUGUUCCUG | 2116 | AAGGAACAUACCAAGGCAUCCAC |
| 460 | 2077 | 419 | 437 | AUGCCUUGAUAUGUUCCUG | 2117 | UAGGAACAUAUCAAGGCAUUU |
| 461 | 2078 | 419 | 437 | AUGCCUUGGUUUGUUCCUG | 2118 | UAGGAACAAACCAAGGCAUUU |
| 462 | 2079 | 419 | 437 | AUGCCUUGGUUUGUUCCUG | 2119 | AAGGAACAAACCAAGGCAUCC |
| 463 | 2080 | 419 | 437 | AUGCCUUGGUAUGUUCCUG | 2120 | CAGGAACAUACCAAGGCAUUU |
| 464 | 2081 | 419 | 437 | AUGCCUUGGUAUGUUCCUG | 2121 | CAGGAACAUACCAAGGCAUUU |
| 465 | 2082 | 419 | 437 | AUGCCUUGGUAUGUUCCUG | 2122 | CAGGAACAUACCAAGGCAUUU |
| 468 | 2085 | 419 | 437 | AUGCCUUGGUAUGUUCCUG | 2125 | AAGGAACAUACCAAGGCAUCC |
| 472 | 2089 | 419 | 437 | AUGCCUUGGUAUGUUCCUG | 2129 | AAGGAACAUACCAAGGCAUCC |
| 473 | 2090 | 419 | 437 | AUGCCUUGGUAUGUUCCUG | 2130 | UAGGAACAUACCAAGGCAUCC |
| 474 | 2091 | 417 | 437 | GGAUGCCUUGGUAUGUUCCUG | 2131 | AAGGAACAUACCAAGGCAUCCAC |
| 475 | 2092 | 419 | 437 | AUGCCUUGGUUUGUUCCUG | 2132 | AAGGAACAAACCAAGGCAUCC |
| 476 | 2093 | 385 | 405 | GUGUCUGACUUUCGGUCCAAA | 2133 | UUUGGACCGAAAGUCAGACACUU |
| 477 | 2094 | 385 | 405 | GUGUCUGACUUUCGGUCCAAA | 2134 | UUUGGACCGAAAGUCAGACACCA |
| 478 | 2095 | 385 | 405 | GUGUCUGACUUUCGGUCCAAA | 2135 | AUUGGACCGAAAGUCAGACACCA |
| 479 | 2096 | 385 | 405 | GUGUCUGACUUUCGGUCCAAA | 2136 | AUUGGACCGAAAGUCAGACACCA |
| 480 | 2097 | 400 | 420 | UCCAAAGACGAAGUCGUGGAU | 2137 | AUCCACGACUUCGUCUUUGGACC |
| 481 | 2098 | 400 | 420 | UCCAAAGACGAAGUCGUGGAU | 2138 | UUCCACGACUUCGUCUUUGGACC |
| 482 | 2099 | 400 | 420 | UCCAAAGACGAAGUCGUGGAU | 2139 | UUCCACGACUUCGUCUUUGGACC |
| 483 | 2100 | 530 | 550 | AUGCCAAAACAACCAUCACCG | 2140 | AGGUGAUGGUUGUUUUGGCAUUU |
| 484 | 2101 | 530 | 550 | AUGCCAAAACAACCAUCACCG | 2141 | AGGUGAUGGUUGUUUUGGCAUCA |
| 485 | 2102 | 530 | 550 | AUGCCAAAACAACCAUCACCG | 2142 | AGGUGAUGGUUGUUUUGGCAUCA |
| 486 | 2103 | 409 | 429 | GAAGUCGUGGAUGCCUUGGUA | 2143 | UACCAAGGCAUCCACGACUUCGU |
| 487 | 2104 | 409 | 429 | GAAGUCGUGGAUGCCUUGGUA | 2144 | AACCAAGGCAUCCACGACUUCGU |
| 488 | 2105 | 409 | 429 | GAAGUCGUGGAUGCCUUGGUA | 2145 | AACCAAGGCAUCCACGACUUCGU |
| 489 | 2106 | 413 | 433 | UCGUGGAUGCCUUGGUAUGUU | 2146 | AACAUACCAAGGCAUCCACGACU |
| 490 | 2107 | 411 | 431 | AGUCGUGGAUGCCUUGGUAUG | 2147 | AAUACCAAGGCAUCCACGACUUC |
| 491 | 2228 | 400 | 420 | UCCAAAGACGAAGUCGUGGAU | 2253 | AUCCACGACUUCGUCUUUGGAUU |
| 494 | 2231 | 530 | 550 | AUGCCAAAACAACCAUCACCU | 2256 | AGGUGAUGGUUGUUUUGGCAUCA |
| 496 | 2233 | 409 | 429 | GAAGUCGUGGAUGCCUUGGUA | 2258 | UACCAAGGCAUCCACGACUUCGU |
| 497 | 2234 | 409 | 429 | GAAGUCGUGGAUGCCUUGGUA | 2259 | AACCAAGGCAUCCACGACUUCGU |
| 498 | 2235 | 409 | 429 | GAAGUCGUGGAUGCCUUGGUU | 2260 | AACCAAGGCAUCCACGACUUCGU |
| 499 | 2236 | 409 | 429 | GAAGUCGUGGCUGCCUUGGUA | 2261 | AACCAAGGCAUCCACGACUUCGU |
| 501 | 2238 | 409 | 429 | GAAGUCGUGGAUGCCUUGGUU | 2263 | AACCAAGGCAUCCACGACUUCGU |
| 502 | 2239 | 409 | 429 | GAAGUCGUGGCUGCCUUGGUA | 2264 | AACCAAGGCAUCCACGACUUCGU |
| 504 | 2241 | 412 | 432 | GUCGUGGAUGCCUUGGUAUGU | 2266 | ACAUACCAAGGCAUCCACGACUU |
| 505 | 2242 | 413 | 433 | UCGUGGAUGCCUUGGUAUGUU | 2267 | AACAUACCAAGGCAUCCACGAUU |
| 506 | 2243 | 413 | 433 | UCGUGGAUGCCUUGGUAUGUU | 2268 | AACAUACCAAGGCAUCCACGAUU |
| 507 | 2244 | 497 | 515 | AUGGAGGAGUGAGUGACAA | 2269 | UUGUCACUCACUCCUCCAUUU |
| 508 | 2245 | 530 | 550 | AUGCCAAAACAACCAUCACCG | 2270 | CGGUGAUGGUUGUUUUGGCAUUU |
| 509 | 2246 | 409 | 429 | GAAGUCGUGGAUGCCUUGGUA | 2271 | UACCAAGGCAUCCACGACUUCUU |
| 510 | 2247 | 409 | 429 | GAAGUCGUGGAUGCCUUGGUA | 2272 | UACCAAGGCAUCCACGACUUCUU |
| 511 | 2248 | 385 | 405 | GUGUCUGACUUUCGGUCCAAA | 2273 | UUUGGACCGAAAGUCAGACACUU |
| 512 | 2249 | 400 | 420 | UCCAAAGACGAAGUCGUGGAU | 2274 | AUCCACGACUUCGUCUUUGGAUU |
| 513 | 2250 | 412 | 432 | GUCGUGGAUGCCUUGGUAUGU | 2275 | ACAUACCAAGGCAUCCACGACUU |
| 514 | 2251 | 530 | 550 | AUGCCAAAACAACCAUCACCG | 2276 | CGGUGAUGGUUGUUUUGGCAUUU |
| 515 | 2252 | 409 | 429 | GAAGUCGUGGAUGCCUUGGUA | 2277 | UACCAAGGCAUCCACGACUUCUU |

TABLE 1A
siRNA Sequences

| | | Target | Target | | | |
|---|---|---|---|---|---|---|
| | | Site | Site | | | |
| | | Start | End | | | |
| siRNA | | Position | Position | Sense Strand Base | | Antisense Strand Base |
| Duplex | SEQ | in SEQ | in SEQ | Sequence + Chem | SEQ | Sequence + Chem |
| ID NO. | ID | ID NO. | ID NO. | Modifications | ID | Modifications |
| (Dx) | NO. | 2067 | 2067 | (5′-3′) | NO. | (5′-3′) |
| 466 | 2083 | 419 | 437 | AUGCf2PUUGGUAUGUUCCUG | 2123 | CAGGAACAUACCAAGGCAUUU |
| 467 | 2084 | 419 | 437 | AUGCCUUGGUAUGUUCmun34CUG | 2124 | CAGGAACAUACCAAGGCAUCC |
| 469 | 2086 | 419 | 437 | AUGCf2PUUGGUAUGUUCCUG | 2126 | AAGGAACAUACCAAGGCAUCC |
| 470 | 2087 | 419 | 437 | AUGCf2PUUGGUAUGUUCCUG | 2127 | AAGGAACAUACCAAGGCAUCC |
| 471 | 2088 | 419 | 437 | AUGCCUUGGUAUGUUCmun34CUG | 2128 | AAGGAACAUACCAAGGCAUCC |
| 492 | 2229 | 530 | 550 | AUGCCAAAAf2PAACCAUCACCG | 2254 | AGGUGAUGGUUGUUUUGGCAUCA |
| 493 | 2230 | 530 | 550 | AUGCCAAAACAACCAUCAmun34CCG | 2255 | AGGUGAUGGUUGUUUUGGCAUCA |
| 495 | 2232 | 530 | 550 | AUGCCAAAAf2PAACCAUCACCU | 2257 | AGGUGAUGGUUGUUUUGGCAUCA |
| 500 | 2237 | 409 | 429 | GAAGUCGUGGAUGCCUUGmun34GUA | 2262 | AACCAAGGCAUCCACGACUUCGU |
| 503 | 2240 | 409 | 429 | GAAGUCGUGGAUGCCUUGmun34GUA | 2265 | AACCAAGGCAUCCACGACUUCGU |

TABLE 2
siRNA Modified Sequences

| | | Target | | | | |
|---|---|---|---|---|---|---|
| | | Site | Target | | | |
| | | Start | Site End | | | |
| siRNA | | Position | Position | | | |
| Duplex | | in SEQ | in SEQ | | | |
| ID NO. | SEQ ID | ID NO. | ID NO. | Sense Strand Base Sequence + Chem | SEQ ID | Antisense Strand Base Sequence + Chem |
| (MDx) | NO. | 2067 | 2067 | Modifications (5′-3′) | NO. | Modifications (5′-3′) |
| 1 | 903 | 1 | 19 | fApsmUpsfGmUfAmCfGmAfCmGfCmAfGmAfG | 1485 | mCpsfGpsmCfGmCfUmCfUmGfCmGfUmCfGmUfAmCfAmUpsmUp |
| | | | | mCfGmCfGpsmUpsmU | | smU |
| 2 | 904 | 2 | 20 | fUpsmGpsfUmAfCmGfAmCfGmCfAmGfAmGfC | 1486 | mCpsfCpsmGfCmGfCmUfCmUfGmCfGmUfCmGfUmAfCmApsmUp |
| | | | | mGfCmGfGpsmUpsmU | | smU |
| 3 | 905 | 3 | 21 | fGpsmUpsfAmCfGmAfCmGfCmAfGmAfGmCfG | 1487 | mGpsfCpsmCfGmCfGmCfUmCfUmGfCmGfUmCfGmUfAmCpsmUp |
| | | | | mCfGmGfCpsmUpsmU | | smU |
| 4 | 906 | 5 | 23 | fApsmCpsfGmAfCmGfCmAfGmAfGmCfGmCfG | 1488 | mCpsfApsmGfCmCfGmCfGmCfUmCfUmGfCmGfUmCfGmUpsmUp |
| | | | | mGfCmUfGpsmUpsmU | | smU |
| 5 | 907 | 6 | 24 | fCpsmGpsfAmCfGmCfAmGfAmGfCmGfCmGfG | 1489 | mCpsfCpsmAfGmCfCmGfCmGfCmUfCmUfGmCfGmUfCmGpsmUp |
| | | | | mCfUmGfGpsmUpsmU | | smU |
| 6 | 908 | 7 | 25 | fGpsmApsfCmGfCmAfGmAfGmCfGmCfGmGfC | 1490 | mUpsfCpsmCfAmGfCmCfGmCfGmCfUmCfUmGfCmGfUmCpsmUp |
| | | | | mUfGmGfApsmUpsmU | | smU |
| 7 | 909 | 10 | 28 | fGpsmCpsfAmGfAmGfCmGfCmGfGmCfUmGf | 1491 | mApsfGpsmCfUmCfCmAfGmCfCmGfCmGfCmUfCmUfGmCpsmUp |
| | | | | GmAfGmCfUpsmUpsmU | | smU |
| 8 | 910 | 11 | 29 | fCpsmApsfGmAfGmCfGmCfGmGfCmUfGmGfA | 1492 | mApsfApsmGfCmUfCmCfAmGfCmCfGmCfGmCfUmCfUmGpsmUp |
| | | | | mGfCmUfUpsmUpsmU | | smU |
| 9 | 911 | 12 | 30 | fApsmGpsfAmGfCmGfCmGfGmCfUmGfGmAf | 1493 | mCpsfApsmAfGmCfUmCfCmAfGmCfCmGfCmGfCmUfCmUpsmUp |
| | | | | GmCfUmUfGpsmUpsmU | | smU |
| 10 | 912 | 13 | 31 | fGpsmApsfGmCfGmCfGmGfCmUfGmGfAmGf | 1494 | mApsfCpsmAfAmGfCmUfCmCfAmGfCmCfGmCfGmCfUmCpsmUps |
| | | | | CmUfUmGfUpsmUpsmU | | mU |
| 11 | 913 | 15 | 33 | fGpsmCpsfGmCfGmGfCmUfGmGfAmGfCmUf | 1495 | mGpsfGpsmAfCmAfAmGfCmUfCmCfAmGfCmCfGmCfGmCpsmUp |
| | | | | UmGfUmCfCpsmUpsmU | | smU |
| 12 | 914 | 16 | 34 | fCpsmGpsfCmGfGmCfUmGfGmAfGmCfUmUf | 1496 | mApsfGpsmGfAmCfAmAfGmCfUmCfCmAfGmCfCmGfCmGpsmUp |
| | | | | GmUfCmCfUpsmUpsmU | | smU |
| 13 | 915 | 17 | 35 | fGpsmCpsfGmGfCmUfGmGfAmGfCmUfUmGf | 1497 | mApsfApsmGfGmAfCmAfAmGfCmUfCmCfAmGfCmCfGmCpsmUp |
| | | | | UmCfCmUfUpsmUpsmU | | smU |
| 14 | 916 | 20 | 38 | fGpsmCpsfUmGfGmAfGmCfUmUfGmUfCmCf | 1498 | mGpsfCpsmGfAmAfGmGfAmCfAmAfGmCfUmCfCmAfGmCpsmUp |
| | | | | UmUfCmGfCpsmUpsmU | | smU |
| 15 | 917 | 22 | 40 | fUpsmGpsfGmAfGmCfUmUfGmUfCmCfUmUf | 1499 | mCpsfCpsmGfCmGfAmAfGmGfAmCfAmAfGmCfUmCfCmApsmUp |
| | | | | CmGfCmGfGpsmUpsmU | | smU |
| 16 | 918 | 23 | 41 | fGpsmGpsfAmGfCmUfUmGfUmCfCmUfUmCf | 1500 | mCpsfCpsmCfGmCfGmAfAmGfGmAfCmAfAmGfCmUfCmCpsmUps |
| | | | | GmCfGmGfGpsmUpsmU | | mU |
| 17 | 919 | 24 | 42 | fGpsmApsfGmCfUmUfGmUfCmCfUmUfCmGf | 1501 | mGpsfCpsmCfCmGfCmGfAmAfGmGfAmCfAmAfGmCfUmCpsmUp |
| | | | | CmGfGmGfCpsmUpsmU | | smU |
| 18 | 920 | 25 | 43 | fApsmGpsfCmUfUmGfUmCfCmUfUmCfGmCf | 1502 | mApsfGpsmCfCmCfGmCfGmAfAmGfGmAfCmAfAmGfCmUpsmUp |
| | | | | GmGfGmCfUpsmUpsmU | | smU |
| 19 | 921 | 30 | 48 | fGpsmUpsfCmCfUmUfCmGfCmGfGmGfCmUf | 1503 | mGpsfCpsmCfGmCfAmGfCmCfCmGfCmGfAmAfGmGfAmCpsmUp |
| | | | | GmCfGmGfCpsmUpsmU | | smU |
| 20 | 922 | 41 | 59 | fGpsmCpsfUmGfCmGfGmCfUmUfCmCfUmGf | 1504 | mApsfApsmGfCmCfCmAfGmGfAmAfGmCfCmGfCmAfGmCpsmUp |
| | | | | GmGfCmUfUpsmUpsmU | | smU |
| 21 | 923 | 42 | 60 | fCpsmUpsfGmCfGmGfCmUfUmCfCmUfGmGf | 1505 | mGpsfApsmAfGmCfCmCfAmGfGmAfAmGfCmCfGmCfAmGpsmUp |
| | | | | GmCfUmUfCpsmUpsmU | | smU |
| 22 | 924 | 45 | 63 | fCpsmGpsfGmCfUmUfCmCfUmGfGmGfCmUf | 1506 | mGpsfUpsmAfGmAfAmGfCmCfCmAfGmGfAmAfGmCfCmGpsmUp |
| | | | | UmCfUmAfCpsmUpsmU | | smU |
| 23 | 925 | 52 | 70 | fCpsmUpsfGmGfGmCfUmUfCmUfAmCfCmAfC | 1507 | mCpsfGpsmAfCmGfUmGfGmUfAmGfAmAfGmCfCmCfAmGpsmUp |
| | | | | mGfUmCfGpsmUpsmU | | smU |
| 24 | 926 | 53 | 71 | fUpsmGpsfGmGfCmUfUmCfUmAfCmCfAmCfG | 1508 | mCpsfCpsmGfAmCfGmUfGmGfUmAfGmAfAmGfCmCfCmApsmUp |
| | | | | mUfCmGfGpsmUpsmU | | smU |
| 25 | 927 | 55 | 73 | fGpsmGpsfCmUfUmCfUmAfCmCfAmCfGmUfC | 1509 | mCpsfCpsmCfCmGfAmCfGmUfGmGfUmAfGmAfAmGfCmCpsmUp |
| | | | | mGfGmGfGpsmUpsmU | | smU |
| 26 | 928 | 56 | 74 | fGpsmCpsfUmUfCmUfAmCfCmAfCmGfUmCfG | 1510 | mGpsfCpsmCfCmCfGmAfCmGfUmGfGmUfAmGfAmAfGmCpsmUp |
| | | | | mGfGmGfCpsmUpsmU | | smU |
| 27 | 929 | 57 | 75 | fCpsmUpsfUmCfUmAfCmCfAmCfGmUfCmGfG | 1511 | mCpsfGpsmCfCmCfCmGfAmCfGmUfGmGfUmAfGmAfAmGpsmUp |
| | | | | mGfGmCfGpsmUpsmU | | smU |
| 28 | 930 | 58 | 76 | fUpsmUpsfCmUfAmCfCmAfCmGfUmCfGmGfG | 1512 | mUpsfCpsmGfCmCfCmCfGmAfCmGfUmGfGmUfAmGfAmApsmUp |
| | | | | mGfCmGfApsmUpsmU | | smU |
| 29 | 931 | 59 | 77 | fUpsmCpsfUmAfCmCfAmCfGmUfCmGfGmGfG | 1513 | mGpsfUpsmCfGmCfCmCfCmGfAmCfGmUfGmGfUmAfGmApsmUp |
| | | | | mCfGmAfCpsmUpsmU | | smU |
| 30 | 932 | 60 | 78 | fCpsmUpsfAmCfCmAfCmGfUmCfGmGfGmGfC | 1514 | mGpsfGpsmUfCmGfCmCfCmCfGmAfCmGfUmGfGmUfAmGpsmUp |
| | | | | mGfAmCfCpsmUpsmU | | smU |
| 31 | 933 | 62 | 80 | fApsmCpsfCmAfCmGfUmCfGmGfGmGfCmGfA | 1515 | mCpsfGpsmGfGmUfCmGfCmCfCmCfGmAfCmGfUmGfGmUpsmUp |
| | | | | mCfCmCfGpsmUpsmU | | smU |
| 32 | 934 | 81 | 99 | fCpsmUpsfGmCfCmUfGmAfGmCfGmAfGmCfA | 1516 | mGpsfGpsmCfGmUfGmCfUmCfGmCfUmCfAmGfGmCfAmGpsmUp |
| | | | | mCfGmCfCpsmUpsmU | | smU |
| 33 | 935 | 82 | 100 | fUpsmGpsfCmCfUmGfAmGfCmGfAmGfCmAfC | 1517 | mGpsfGpsmGfCmGfUmGfCmUfCmGfCmUfCmAfGmGfCmApsmUp |
| | | | | mGfCmCfCpsmUpsmU | | smU |
| 34 | 936 | 84 | 102 | fCpsmCpsfUmGfAmGfCmGfAmGfCmAfCmGfC | 1518 | mCpsfGpsmGfGmGfCmGfUmGfCmUfCmGfCmUfCmAfGmGpsmU |
| | | | | mCfCmCfGpsmUpsmU | | psmU |
| 35 | 937 | 87 | 105 | fGpsmApsfGmCfGmAfGmCfAmCfGmCfCmCfC | 1519 | mGpsfUpsmGfCmGfGmGfGmCfGmUfGmCfUmCfGmCfUmCpsmU |
| | | | | mGfCmAfCpsmUpsmU | | psmU |
| 36 | 938 | 88 | 106 | fApsmGpsfCmGfAmGfCmAfCmGfCmCfCmCfG | 1520 | mGpsfGpsmUfGmCfGmGfGmGfCmGfUmGfCmUfCmGfCmUpsmU |
| | | | | mCfAmCfCpsmUpsmU | | psmU |
| 37 | 939 | 91 | 109 | fGpsmApsfGmCfAmCfGmCfCmCfCmGfCmAfC | 1521 | mGpsfGpsmAfGmGfUmGfCmGfGmGfGmCfGmUfGmCfUmCpsmU |
| | | | | mCfUmCfCpsmUpsmU | | psmU |
| 38 | 940 | 98 | 116 | fCpsmCpsfCmCfGmCfAmCfCmUfCmCfUmCfC | 1522 | mUpsfCpsmGfCmGfGmAfGmGfAmGfGmUfGmCfGmGfGmGpsmU |
| | | | | mGfCmGfApsmUpsmU | | psmU |
| 39 | 941 | 99 | 117 | fCpsmCpsfCmGfCmAfCmCfUmCfCmUfCmCfG | 1523 | mGpsfUpsmCfGmCfGmGfAmGfGmAfGmGfUmGfCmGfGmGpsmU |
| | | | | mCfGmAfCpsmUpsmU | | psmU |
| 40 | 942 | 100 | 118 | fCpsmCpsfGmCfAmCfCmUfCmCfUmCfCmGfC | 1524 | mCpsfGpsmUfCmGfCmGfGmAfGmGfAmGfGmUfGmCfGmGpsmU |
| | | | | mGfAmCfGpsmUpsmU | | psmU |
| 41 | 943 | 101 | 119 | fCpsmGpsfCmAfCmCfUmCfCmUfCmCfGmCfG | 1525 | mGpsfCpsmGfUmCfGmCfGmGfAmGfGmAfGmGfUmGfCmGpsmU |
| | | | | mAfCmGfCpsmUpsmU | | psmU |
| 42 | 944 | 105 | 123 | fCpsmCpsfUmCfCmUfCmCfGmCfGmAfCmGfC | 1526 | mGpsfCpsmGfCmGfCmGfUmCfGmCfGmGfAmGfGmAfGmGpsmU |
| | | | | mGfCmGfCpsmUpsmU | | psmU |
| 43 | 945 | 106 | 124 | fCpsmUpsfCmCfUmCfCmGfCmGfAmCfGmCfG | 1527 | mUpsfGpsmCfGmCfGmCfGmUfCmGfCmGfGmAfGmGfAmGpsmU |
| | | | | mCfGmCfApsmUpsmU | | psmU |
| 44 | 946 | 107 | 125 | fUpsmCpsfCmUfCmCfGmCfGmAfCmGfCmGfC | 1528 | mApsfUpsmGfCmGfCmGfCmGfUmCfGmCfGmGfAmGfGmApsmUp |
| | | | | mGfCmAfUpsmUpsmU | | smU |
| 45 | 947 | 108 | 126 | fCpsmCpsfUmCfCmGfCmGfAmCfGmCfGmCfG | 1529 | mCpsfApsmUfGmCfGmCfGmCfGmUfCmGfCmGfGmAfGmGpsmUp |
| | | | | mCfAmUfGpsmUpsmU | | smU |
| 46 | 948 | 109 | 127 | fCpsmUpsfCmCfGmCfGmAfCmGfCmGfCmGfC | 1530 | mApsfCpsmAfUmGfCmGfCmGfCmGfUmCfGmCfGmGfAmGpsmUp |
| | | | | mAfUmGfUpsmUpsmU | | smU |
| 47 | 949 | 110 | 128 | fUpsmCpsfCmGfCmGfAmCfGmCfGmCfGmCfA | 1531 | mApsfApsmCfAmUfGmCfGmCfGmCfGmUfCmGfCmGfGmApsmUp |
| | | | | mUfGmUfUpsmUpsmU | | smU |
| 48 | 950 | 111 | 129 | fCpsmCpsfGmCfGmAfCmGfCmGfCmGfCmAfU | 1532 | mCpsfApsmAfCmAfUmGfCmGfCmGfCmGfUmCfGmCfGmGpsmUp |
| | | | | mGfUmUfGpsmUpsmU | | smU |
| 49 | 951 | 112 | 130 | fCpsmGpsfCmGfAmCfGmCfGmCfGmCfAmUfG | 1533 | mApsfCpsmAfAmCfAmUfGmCfGmCfGmCfGmUfCmGfCmGpsmUp |
| | | | | mUfUmGfUpsmUpsmU | | smU |
| 50 | 952 | 113 | 131 | fGpsmCpsfGmAfCmGfCmGfCmGfCmAfUmGfU | 1534 | mApsfApsmCfAmAfCmAfUmGfCmGfCmGfCmGfUmCfGmCpsmUp |
| | | | | mUfGmUfUpsmUpsmU | | smU |
| 51 | 953 | 115 | 133 | fGpsmApsfCmGfCmGfCmGfCmAfUmGfUmUf | 1535 | mCpsfGpsmAfAmCfAmAfCmAfUmGfCmGfCmGfCmGfUmCpsmUp |
| | | | | GmUfUmCfGpsmUpsmU | | smU |
| 52 | 954 | 116 | 134 | fApsmCpsfGmCfGmCfGmCfAmUfGmUfUmGf | 1536 | mCpsfCpsmGfAmAfCmAfAmCfAmUfGmCfGmCfGmCfGmUpsmUp |
| | | | | UmUfCmGfGpsmUpsmU | | smU |
| 53 | 955 | 117 | 135 | fCpsmGpsfCmGfCmGfCmAfUmGfUmUfGmUf | 1537 | mGpsfCpsmCfGmAfAmCfAmAfCmAfUmGfCmGfCmGfCmGpsmUp |
| | | | | UmCfGmGfCpsmUpsmU | | smU |
| 54 | 956 | 118 | 136 | fGpsmCpsfGmCfGmCfAmUfGmUfUmGfUmUf | 1538 | mCpsfGpsmCfCmGfAmAfCmAfAmCfAmUfGmCfGmCfGmCpsmUps |
| | | | | CmGfGmCfGpsmUpsmU | | mU |
| 55 | 957 | 127 | 145 | fUpsmUpsfGmUfUmCfGmGfCmGfCmUfUmCf | 1539 | mCpsfGpsmGfCmCfGmAfAmGfCmGfCmCfGmAfAmCfAmApsmUp |
| | | | | GmGfCmCfGpsmUpsmU | | smU |
| 56 | 958 | 128 | 146 | fUpsmGpsfUmUfCmGfGmCfGmCfUmUfCmGf | 1540 | mCpsfCpsmGfGmCfCmGfAmAfGmCfGmCfCmGfAmAfCmApsmUps |
| | | | | GmCfCmGfGpsmUpsmU | | mU |
| 57 | 959 | 139 | 157 | fUpsmCpsfGmGfCmCfGmGfGmGfCmGfUmUf | 1541 | mApsfGpsmUfGmCfAmAfCmGfCmCfCmCfGmGfCmCfGmApsmUp |
| | | | | GmCfAmCfUpsmUpsmU | | smU |
| 58 | 960 | 214 | 232 | fCpsmUpsfUmGfUmGfCmGfGmAfAmGfGmCf | 1542 | mUpsfCpsmCfUmGfGmCfCmUfUmCfCmGfCmAfCmAfAmGpsmUp |
| | | | | CmAfGmGfApsmUpsmU | | smU |
| 59 | 961 | 216 | 234 | fUpsmGpsfUmGfCmGfGmAfAmGfGmCfCmAf | 1543 | mApsfCpsmUfCmCfUmGfGmCfCmUfUmCfCmGfCmAfCmApsmUp |
| | | | | GmGfAmGfUpsmUpsmU | | smU |
| 60 | 962 | 218 | 236 | fUpsmGpsfCmGfGmAfAmGfGmCfCmAfGmGf | 1544 | mCpsfGpsmAfCmUfCmCfUmGfGmCfCmUfUmCfCmGfCmApsmUp |
| | | | | AmGfUmCfGpsmUpsmU | | smU |
| 61 | 963 | 220 | 238 | fCpsmGpsfGmAfAmGfGmCfCmAfGmGfAmGf | 1545 | mUpsfCpsmCfGmAfCmUfCmCfUmGfGmCfCmUfUmCfCmGpsmUp |
| | | | | UmCfGmGfApsmUpsmU | | smU |
| 62 | 964 | 223 | 241 | fApsmApsfGmGfCmCfAmGfGmAfGmUfCmGf | 1546 | mUpsfGpsmUfUmCfCmGfAmCfUmCfCmUfGmGfCmCfUmUpsmUp |
| | | | | GmAfAmCfApsmUpsmU | | smU |
| 63 | 965 | 224 | 242 | fApsmGpsfGmCfCmAfGmGfAmGfUmCfGmGf | 1547 | mApsfUpsmGfUmUfCmCfGmAfCmUfCmCfUmGfGmCfCmUpsmUp |
| | | | | AmAfCmAfUpsmUpsmU | | smU |
| 64 | 966 | 225 | 243 | fGpsmGpsfCmCfAmGfGmAfGmUfCmGfGmAf | 1548 | mApsfApsmUfGmUfUmCfCmGfAmCfUmCfCmUfGmGfCmCpsmUp |
| | | | | AmCfAmUfUpsmUpsmU | | smU |
| 65 | 967 | 228 | 246 | fCpsmApsfGmGfAmGfUmCfGmGfAmAfCmAfU | 1549 | mGpsfCpsmCfAmAfUmGfUmUfCmCfGmAfCmUfCmCfUmGpsmUp |
| | | | | mUfGmGfCpsmUpsmU | | smU |
| 66 | 968 | 229 | 247 | fApsmGpsfGmAfGmUfCmGfGmAfAmCfAmUf | 1550 | mUpsfGpsmCfCmAfAmUfGmUfUmCfCmGfAmCfUmCfCmUpsmUp |
| | | | | UmGfGmCfApsmUpsmU | | smU |
| 67 | 969 | 235 | 253 | fCpsmGpsfGmAfAmCfAmUfUmGfGmCfAmUfC | 1551 | mGpsfGpsmAfAmGfAmUfGmCfCmAfAmUfGmUfUmCfCmGpsmU |
| | | | | mUfUmCfCpsmUpsmU | | psmU |
| 68 | 970 | 238 | 256 | fApsmApsfCmAfUmUfGmGfCmAfUmCfUmUfC | 1552 | mGpsfApsmUfGmGfAmAfGmAfUmGfCmCfAmAfUmGfUmUpsmU |
| | | | | mCfAmUfCpsmUpsmU | | psmU |
| 69 | 971 | 239 | 257 | fApsmCpsfAmUfUmGfGmCfAmUfCmUfUmCfC | 1553 | mGpsfGpsmAfUmGfGmAfAmGfAmUfGmCfCmAfAmUfGmUpsmU |
| | | | | mAfUmCfCpsmUpsmU | | psmU |
| 70 | 972 | 259 | 277 | fUpsmCpsfCmUfUmCfAmAfCmUfUmAfAmGfC | 1554 | mApsfCpsmUfUmGfCmUfUmAfAmGfUmUfGmAfAmGfGmApsmU |
| | | | | mAfAmGfUpsmUpsmU | | psmU |
| 71 | 973 | 261 | 279 | fCpsmUpsfUmCfAmAfCmUfUmAfAmGfCmAfA | 1555 | mGpsfApsmAfCmUfUmGfCmUfUmAfAmGfUmUfGmAfAmGpsmU |
| | | | | mGfUmUfCpsmUpsmU | | psmU |
| 72 | 974 | 302 | 320 | fGpsmCpsfCmUfCmCfCmGfGmCfCmAfAmUfG | 1556 | mUpsfGpsmGfAmCfAmUfUmGfGmCfCmGfGmGfAmGfGmCpsmU |
| | | | | mUfCmCfApsmUpsmU | | psmU |
| 73 | 975 | 303 | 321 | fCpsmCpsfUmCfCmCfGmGfCmCfAmAfUmGfU | 1557 | mGpsfUpsmGfGmAfCmAfUmUfGmGfCmCfGmGfGmAfGmGpsmU |
| | | | | mCfCmAfCpsmUpsmU | | psmU |
| 74 | 976 | 311 | 329 | fCpsmCpsfAmAfUmGfUmCfCmAfCmCfAmGfC | 1558 | mApsfUpsmGfAmGfCmUfGmGfUmGfGmAfCmAfUmUfGmGpsmU |
| | | | | mUfCmAfUpsmUpsmU | | psmU |
| 75 | 977 | 313 | 331 | fApsmApsfUmGfUmCfCmAfCmCfAmGfCmUfC | 1559 | mApsfGpsmAfUmGfAmGfCmUfGmGfUmGfGmAfCmAfUmUpsmU |
| | | | | mAfUmCfUpsmUpsmU | | psmU |
| 76 | 978 | 314 | 332 | fApsmUpsfGmUfCmCfAmCfCmAfGmCfUmCfA | 1560 | mGpsfApsmGfAmUfGmAfGmCfUmGfGmUfGmGfAmCfAmUpsmU |
| | | | | mUfCmUfCpsmUpsmU | | psmU |
| 77 | 979 | 316 | 334 | fGpsmUpsfCmCfAmCfCmAfGmCfUmCfAmUfC | 1561 | mCpsfGpsmGfAmGfAmUfGmAfGmCfUmGfGmUfGmGfAmCpsmU |
| | | | | mUfCmCfGpsmUpsmU | | psmU |
| 78 | 980 | 317 | 335 | fUpsmCpsfCmAfCmCfAmGfCmUfCmAfUmCfU | 1562 | mCpsfCpsmGfGmAfGmAfUmGfAmGfCmUfGmGfUmGfGmApsmU |
| | | | | mCfCmGfGpsmUpsmU | | psmU |
| 79 | 981 | 321 | 339 | fCpsmCpsfAmGfCmUfCmAfUmCfUmCfCmGfG | 1563 | mUpsfUpsmUfGmCfCmGfGmAfGmAfUmGfAmGfCmUfGmGpsmU |
| | | | | mCfAmAfApsmUpsmU | | psmU |
| 80 | 982 | 343 | 361 | fGpsmGpsfCmAfUmCfUmCfUmCfUmUfAmCfC | 1564 | mCpsfUpsmCfUmGfGmUfAmAfGmAfGmAfGmAfUmGfCmCpsmU |
| | | | | mAfGmAfGpsmUpsmU | | psmU |
| 81 | 983 | 351 | 369 | fUpsmCpsfUmUfAmCfCmAfGmAfGmUfGmUf | 1565 | mApsfUpsmCfAmGfAmCfAmCfUmCfUmGfGmUfAmAfGmApsmUp |
| | | | | CmUfGmAfUpsmUpsmU | | smU |
| 82 | 984 | 352 | 370 | fCpsmUpsfUmAfCmCfAmGfAmGfUmGfUmCf | 1566 | mCpsfApsmUfCmAfGmAfCmAfCmUfCmUfGmGfUmAfAmGpsmUp |
| | | | | UmGfAmUfGpsmUpsmU | | smU |
| 83 | 985 | 353 | 371 | fUpsmUpsfAmCfCmAfGmAfGmUfGmUfCmUf | 1567 | mCpsfCpsmAfUmCfAmGfAmCfAmCfUmCfUmGfGmUfAmApsmUp |
| | | | | GmAfUmGfGpsmUpsmU | | smU |
| 84 | 986 | 354 | 372 | fUpsmApsfCmCfAmGfAmGfUmGfUmCfUmGf | 1568 | mCpsfCpsmCfAmUfCmAfGmAfCmAfCmUfCmUfGmGfUmApsmUp |
| | | | | AmUfGmGfGpsmUpsmU | | smU |
| 85 | 987 | 359 | 377 | fGpsmApsfGmUfGmUfCmUfGmAfUmGfGmGf | 1569 | mUpsfUpsmUfUmCfCmCfCmAfUmCfAmGfAmCfAmCfUmCpsmUp |
| | | | | GmAfAmAfApsmUpsmU | | smU |
| 86 | 988 | 361 | 379 | fGpsmUpsfGmUfCmUfGmAfUmGfGmGfGmAf | 1570 | mCpsfGpsmUfUmUfUmCfCmCfCmAfUmCfAmGfAmCfAmCpsmUp |
| | | | | AmAfAmCfGpsmUpsmU | | smU |
| 87 | 989 | 362 | 380 | fUpsmGpsfUmCfUmGfAmUfGmGfGmGfAmAf | 1571 | mApsfCpsmGfUmUfUmUfCmCfCmCfAmUfCmAfGmAfCmApsmUp |
| | | | | AmAfCmGfUpsmUpsmU | | smU |
| 88 | 990 | 363 | 381 | fGpsmUpsfCmUfGmAfUmGfGmGfGmAfAmAf | 1572 | mApsfApsmCfGmUfUmUfUmCfCmCfCmAfUmCfAmGfAmCpsmUp |
| | | | | AmCfGmUfUpsmUpsmU | | smU |
| 89 | 991 | 364 | 382 | fUpsmCpsfUmGfAmUfGmGfGmGfAmAfAmAf | 1573 | mGpsfApsmAfCmGfUmUfUmUfCmCfCmCfAmUfCmAfGmApsmUp |
| | | | | CmGfUmUfCpsmUpsmU | | smU |
| 90 | 992 | 365 | 383 | fCpsmUpsfGmAfUmGfGmGfGmAfAmAfAmCf | 1574 | mApsfGpsmAfAmCfGmUfUmUfUmCfCmCfCmAfUmCfAmGpsmUp |
| | | | | GmUfUmCfUpsmUpsmU | | smU |
| 91 | 993 | 366 | 384 | fUpsmGpsfAmUfGmGfGmGfAmAfAmAfCmGf | 1575 | mCpsfApsmGfAmAfCmGfUmUfUmUfCmCfCmCfAmUfCmApsmUp |
| | | | | UmUfCmUfGpsmUpsmU | | smU |
| 92 | 994 | 367 | 385 | fGpsmApsfUmGfGmGfGmAfAmAfAmCfGmUf | 1576 | mCpsfCpsmAfGmAfAmCfGmUfUmUfUmCfCmCfCmAfUmCpsmUp |
| | | | | UmCfUmGfGpsmUpsmU | | smU |
| 93 | 995 | 369 | 387 | fUpsmGpsfGmGfGmAfAmAfAmCfGmUfUmCf | 1577 | mCpsfApsmCfCmAfGmAfAmCfGmUfUmUfUmCfCmCfCmApsmUp |
| | | | | UmGfGmUfGpsmUpsmU | | smU |
| 94 | 996 | 371 | 389 | fGpsmGpsfGmAfAmAfAmCfGmUfUmCfUmGf | 1578 | mGpsfApsmCfAmCfCmAfGmAfAmCfGmUfUmUfUmCfCmCpsmUp |
| | | | | GmUfGmUfCpsmUpsmU | | smU |
| 95 | 997 | 372 | 390 | fGpsmGpsfAmAfAmAfCmGfUmUfCmUfGmGf | 1579 | mApsfGpsmAfCmAfCmCfAmGfAmAfCmGfUmUfUmUfCmCpsmUp |
| | | | | UmGfUmCfUpsmUpsmU | | smU |
| 96 | 998 | 375 | 393 | fApsmApsfAmCfGmUfUmCfUmGfGmUfGmUf | 1580 | mGpsfUpsmCfAmGfAmCfAmCfCmAfGmAfAmCfGmUfUmUpsmUp |
| | | | | CmUfGmAfCpsmUpsmU | | smU |
| 97 | 999 | 376 | 394 | fApsmApsfCmGfUmUfCmUfGmGfUmGfUmCf | 1581 | mApsfGpsmUfCmAfGmAfCmAfCmCfAmGfAmAfCmGfUmUpsmUp |
| | | | | UmGfAmCfUpsmUpsmU | | smU |
| 98 | 1000 | 377 | 395 | fApsmCpsfGmUfUmCfUmGfGmUfGmUfCmUf | 1582 | mApsfApsmGfUmCfAmGfAmCfAmCfCmAfGmAfAmCfGmUpsmUp |
| | | | | GmAfCmUfUpsmUpsmU | | smU |
| 99 | 1001 | 378 | 396 | fCpsmGpsfUmUfCmUfGmGfUmGfUmCfUmGf | 1583 | mApsfApsmAfGmUfCmAfGmAfCmAfCmCfAmGfAmAfCmGpsmUp |
| | | | | AmCfUmUfUpsmUpsmU | | smU |
| 100 | 1002 | 379 | 397 | fGpsmUpsfUmCfUmGfGmUfGmUfCmUfGmAf | 1584 | mGpsfApsmAfAmGfUmCfAmGfAmCfAmCfCmAfGmAfAmCpsmUp |
| | | | | CmUfUmUfCpsmUpsmU | | smU |
| 101 | 1003 | 380 | 398 | fUpsmUpsfCmUfGmGfUmGfUmCfUmGfAmCf | 1585 | mCpsfGpsmAfAmAfGmUfCmAfGmAfCmAfCmCfAmGfAmApsmUp |
| | | | | UmUfUmCfGpsmUpsmU | | smU |
| 102 | 1004 | 382 | 400 | fCpsmUpsfGmGfUmGfUmCfUmGfAmCfUmUf | 1586 | mApsfCpsmCfGmAfAmAfGmUfCmAfGmAfCmAfCmCfAmGpsmUp |
| | | | | UmCfGmGfUpsmUpsmU | | smU |
| 103 | 1005 | 383 | 401 | fUpsmGpsfGmUfGmUfCmUfGmAfCmUfUmUf | 1587 | mGpsfApsmCfCmGfAmAfAmGfUmCfAmGfAmCfAmCfCmApsmUp |
| | | | | CmGfGmUfCpsmUpsmU | | smU |
| 104 | 1006 | 384 | 402 | fGpsmGpsfUmGfUmCfUmGfAmCfUmUfUmCf | 1588 | mGpsfGpsmAfCmCfGmAfAmAfGmUfCmAfGmAfCmAfCmCpsmUp |
| | | | | GmGfUmCfCpsmUpsmU | | smU |
| 105 | 1007 | 385 | 403 | fGpsmUpsfGmUfCmUfGmAfCmUfUmUfCmGf | 1589 | mUpsfGpsmGfAmCfCmGfAmAfAmGfUmCfAmGfAmCfAmCpsmUp |
| | | | | GmUfCmCfApsmUpsmU | | smU |
| 106 | 1008 | 386 | 404 | fUpsmGpsfUmCfUmGfAmCfUmUfUmCfGmGf | 1590 | mUpsfUpsmGfGmAfCmCfGmAfAmAfGmUfCmAfGmAfCmApsmUp |
| | | | | UmCfCmAfApsmUpsmU | | smU |
| 107 | 1009 | 387 | 405 | fGpsmUpsfCmUfGmAfCmUfUmUfCmGfGmUf | 1591 | mUpsfUpsmUfGmGfAmCfCmGfAmAfAmGfUmCfAmGfAmCpsmUp |
| | | | | CmCfAmAfApsmUpsmU | | smU |
| 108 | 1010 | 398 | 416 | fGpsmGpsfUmCfCmAfAmAfGmAfCmGfAmAfG | 1592 | mApsfCpsmGfAmCfUmUfCmGfUmCfUmUfUmGfGmAfCmCpsmUp |
| | | | | mUfCmGfUpsmUpsmU | | smU |
| 109 | 1011 | 399 | 417 | fGpsmUpsfCmCfAmAfAmGfAmCfGmAfAmGfU | 1593 | mCpsfApsmCfGmAfCmUfUmCfGmUfCmUfUmUfGmGfAmCpsmUp |
| | | | | mCfGmUfGpsmUpsmU | | smU |
| 110 | 1012 | 400 | 418 | fUpsmCpsfCmAfAmAfGmAfCmGfAmAfGmUfC | 1594 | mCpsfCpsmAfCmGfAmCfUmUfCmGfUmCfUmUfUmGfGmApsmUp |
| | | | | mGfUmGfGpsmUpsmU | | smU |
| 111 | 1013 | 401 | 419 | fCpsmCpsfAmAfAmGfAmCfGmAfAmGfUmCfG | 1595 | mUpsfCpsmCfAmCfGmAfCmUfUmCfGmUfCmUfUmUfGmGpsmU |
| | | | | mUfGmGfApsmUpsmU | | psmU |
| 112 | 1014 | 402 | 420 | fCpsmApsfAmAfGmAfCmGfAmAfGmUfCmGfU | 1596 | mApsfUpsmCfCmAfCmGfAmCfUmUfCmGfUmCfUmUfUmGpsmUp |
| | | | | mGfGmAfUpsmUpsmU | | smU |
| 113 | 1015 | 404 | 422 | fApsmApsfGmAfCmGfAmAfGmUfCmGfUmGf | 1597 | mGpsfCpsmAfUmCfCmAfCmGfAmCfUmUfCmGfUmCfUmUpsmUp |
| | | | | GmAfUmGfCpsmUpsmU | | smU |
| 114 | 1016 | 405 | 423 | fApsmGpsfAmCfGmAfAmGfUmCfGmUfGmGf | 1598 | mGpsfGpsmCfAmUfCmCfAmCfGmAfCmUfUmCfGmUfCmUpsmUp |
| | | | | AmUfGmCfCpsmUpsmU | | smU |
| 115 | 1017 | 406 | 424 | fGpsmApsfCmGfAmAfGmUfCmGfUmGfGmAf | 1599 | mApsfGpsmGfCmAfUmCfCmAfCmGfAmCfUmUfCmGfUmCpsmUp |
| | | | | UmGfCmCfUpsmUpsmU | | smU |
| 116 | 1018 | 407 | 425 | fApsmCpsfGmAfAmGfUmCfGmUfGmGfAmUf | 1600 | mApsfApsmGfGmCfAmUfCmCfAmCfGmAfCmUfUmCfGmUpsmUp |
| | | | | GmCfCmUfUpsmUpsmU | | smU |
| 117 | 1019 | 409 | 427 | fGpsmApsfAmGfUmCfGmUfGmGfAmUfGmCf | 1601 | mCpsfCpsmAfAmGfGmCfAmUfCmCfAmCfGmAfCmUfUmCpsmUps |
| | | | | CmUfUmGfGpsmUpsmU | | mU |
| 118 | 1020 | 410 | 428 | fApsmApsfGmUfCmGfUmGfGmAfUmGfCmCf | 1602 | mApsfCpsmCfAmAfGmGfCmAfUmCfCmAfCmGfAmCfUmUpsmUp |
| | | | | UmUfGmGfUpsmUpsmU | | smU |
| 119 | 1021 | 412 | 430 | fGpsmUpsfCmGfUmGfGmAfUmGfCmCfUmUf | 1603 | mApsfUpsmAfCmCfAmAfGmGfCmAfUmCfCmAfCmGfAmCpsmUps |
| | | | | GmGfUmAfUpsmUpsmU | | mU |
| 120 | 1022 | 413 | 431 | fUpsmCpsfGmUfGmGfAmUfGmCfCmUfUmGf | 1604 | mCpsfApsmUfAmCfCmAfAmGfGmCfAmUfCmCfAmCfGmApsmUps |
| | | | | GmUfAmUfGpsmUpsmU | | mU |
| 121 | 1023 | 415 | 433 | fGpsmUpsfGmGfAmUfGmCfCmUfUmGfGmUf | 1605 | mApsfApsmCfAmUfAmCfCmAfAmGfGmCfAmUfCmCfAmCpsmUps |
| | | | | AmUfGmUfUpsmUpsmU | | mU |
| 122 | 1024 | 416 | 434 | fUpsmGpsfGmAfUmGfCmCfUmUfGmGfUmAf | 1606 | mGpsfApsmAfCmAfUmAfCmCfAmAfGmGfCmAfUmCfCmApsmUp |
| | | | | UmGfUmUfCpsmUpsmU | | smU |
| 123 | 1025 | 417 | 435 | fGpsmGpsfAmUfGmCfCmUfUmGfGmUfAmUf | 1607 | mGpsfGpsmAfAmCfAmUfAmCfCmAfAmGfGmCfAmUfCmCpsmUp |
| | | | | GmUfUmCfCpsmUpsmU | | smU |
| 124 | 1026 | 419 | 437 | fApsmUpsfGmCfCmUfUmGfGmUfAmUfGmUf | 1608 | mCpsfApsmGfGmAfAmCfAmUfAmCfCmAfAmGfGmCfAmUpsmUp |
| | | | | UmCfCmUfGpsmUpsmU | | smU |
| 125 | 1027 | 421 | 439 | fGpsmCpsfCmUfUmGfGmUfAmUfGmUfUmCf | 1609 | mApsfGpsmCfAmGfGmAfAmCfAmUfAmCfCmAfAmGfGmCpsmUp |
| | | | | CmUfGmCfUpsmUpsmU | | smU |
| 126 | 1028 | 429 | 447 | fApsmUpsfGmUfUmCfCmUfGmCfUmUfCmAf | 1610 | mGpsfGpsmGfCmAfUmGfAmAfGmCfAmGfGmAfAmCfAmUpsmUp |
| | | | | UmGfCmCfCpsmUpsmU | | smU |
| 127 | 1029 | 432 | 450 | fUpsmUpsfCmCfUmGfCmUfUmCfAmUfGmCfC | 1611 | mGpsfApsmAfGmGfGmCfAmUfGmAfAmGfCmAfGmGfAmApsmU |
| | | | | mCfUmUfCpsmUpsmU | | psmU |
| 128 | 1030 | 433 | 451 | fUpsmCpsfCmUfGmCfUmUfCmAfUmGfCmCfC | 1612 | mApsfGpsmAfAmGfGmGfCmAfUmGfAmAfGmCfAmGfGmApsmU |
| | | | | mUfUmCfUpsmUpsmU | | psmU |
| 129 | 1031 | 456 | 474 | fUpsmGpsfGmCfCmUfUmAfUmCfCmCfUmCfC | 1613 | mGpsfGpsmAfAmGfGmAfGmGfGmAfUmAfAmGfGmCfCmApsmU |
| | | | | mUfUmCfCpsmUpsmU | | psmU |
| 130 | 1032 | 461 | 479 | fUpsmUpsfAmUfCmCfCmUfCmCfUmUfCmCfU | 1614 | mCpsfUpsmGfAmAfGmGfAmAfGmGfAmGfGmGfAmUfAmApsmU |
| | | | | mUfCmAfGpsmUpsmU | | psmU |
| 131 | 1033 | 462 | 480 | fUpsmApsfUmCfCmCfUmCfCmUfUmCfCmUfU | 1615 | mUpsfCpsmUfGmAfAmGfGmAfAmGfGmAfGmGfGmAfUmApsmU |
| | | | | mCfAmGfApsmUpsmU | | psmU |
| 132 | 1034 | 466 | 484 | fCpsmCpsfUmCfCmUfUmCfCmUfUmCfAmGfA | 1616 | mCpsfGpsmCfCmUfCmUfGmAfAmGfGmAfAmGfGmAfGmGpsmUp |
| | | | | mGfGmCfGpsmUpsmU | | smU |
| 133 | 1035 | 467 | 485 | fCpsmUpsfCmCfUmUfCmCfUmUfCmAfGmAfG | 1617 | mApsfCpsmGfCmCfUmCfUmGfAmAfGmGfAmAfGmGfAmGpsmUp |
| | | | | mGfCmGfUpsmUpsmU | | smU |
| 134 | 1036 | 469 | 487 | fCpsmCpsfUmUfCmCfUmUfCmAfGmAfGmGfC | 1618 | mGpsfCpsmAfCmGfCmCfUmCfUmGfAmAfGmGfAmAfGmGpsmUp |
| | | | | mGfUmGfCpsmUpsmU | | smU |
| 135 | 1037 | 470 | 488 | fCpsmUpsfUmCfCmUfUmCfAmGfAmGfGmCfG | 1619 | mCpsfGpsmCfAmCfGmCfCmUfCmUfGmAfAmGfGmAfAmGpsmUp |
| | | | | mUfGmCfGpsmUpsmU | | smU |
| 136 | 1038 | 471 | 489 | fUpsmUpsfCmCfUmUfCmAfGmAfGmGfCmGf | 1620 | mUpsfCpsmGfCmAfCmGfCmCfUmCfUmGfAmAfGmGfAmApsmUp |
| | | | | UmGfCmGfApsmUpsmU | | smU |
| 137 | 1039 | 472 | 490 | fUpsmCpsfCmUfUmCfAmGfAmGfGmCfGmUf | 1621 | mApsfUpsmCfGmCfAmCfGmCfCmUfCmUfGmAfAmGfGmApsmUp |
| | | | | GmCfGmAfUpsmUpsmU | | smU |
| 138 | 1040 | 473 | 491 | fCpsmCpsfUmUfCmAfGmAfGmGfCmGfUmGfC | 1622 | mUpsfApsmUfCmGfCmAfCmGfCmCfUmCfUmGfAmAfGmGpsmUp |
| | | | | mGfAmUfApsmUpsmU | | smU |
| 139 | 1041 | 489 | 507 | fApsmUpsfAmUfGmUfGmGfAmUfGmGfAmGf | 1623 | mCpsfApsmCfUmCfCmUfCmCfAmUfCmCfAmCfAmUfAmUpsmUps |
| | | | | GmAfGmUfGpsmUpsmU | | mU |
| 140 | 1042 | 494 | 512 | fUpsmGpsfGmAfUmGfGmAfGmGfAmGfUmGf | 1624 | mUpsfCpsmAfCmUfCmAfCmUfCmCfUmCfCmAfUmCfCmApsmUps |
| | | | | AmGfUmGfApsmUpsmU | | mU |
| 141 | 1043 | 497 | 515 | fApsmUpsfGmGfAmGfGmAfGmUfGmAfGmUf | 1625 | mUpsfUpsmGfUmCfAmCfUmCfAmCfUmCfCmUfCmCfAmUpsmUp |
| | | | | GmAfCmAfApsmUpsmU | | smU |
| 142 | 1044 | 501 | 519 | fApsmGpsfGmAfGmUfGmAfGmUfGmAfCmAf | 1626 | mUpsfApsmCfGmUfUmGfUmCfAmCfUmCfAmCfUmCfCmUpsmUp |
| | | | | AmCfGmUfApsmUpsmU | | smU |
| 143 | 1045 | 502 | 520 | fGpsmGpsfAmGfUmGfAmGfUmGfAmCfAmAf | 1627 | mGpsfUpsmAfCmGfUmUfGmUfCmAfCmUfCmAfCmUfCmCpsmUp |
| | | | | CmGfUmAfCpsmUpsmU | | smU |
| 144 | 1046 | 504 | 522 | fApsmGpsfUmGfAmGfUmGfAmCfAmAfCmGf | 1628 | mGpsfGpsmGfUmAfCmGfUmUfGmUfCmAfCmUfCmAfCmUpsmU |
| | | | | UmAfCmCfCpsmUpsmU | | psmU |
| 145 | 1047 | 505 | 523 | fGpsmUpsfGmAfGmUfGmAfCmAfAmCfGmUf | 1629 | mApsfGpsmGfGmUfAmCfGmUfUmGfUmCfAmCfUmCfAmCpsmUp |
| | | | | AmCfCmCfUpsmUpsmU | | smU |
| 146 | 1048 | 507 | 525 | fGpsmApsfGmUfGmAfCmAfAmCfGmUfAmCfC | 1630 | mGpsfApsmAfGmGfGmUfAmCfGmUfUmGfUmCfAmCfUmCpsmU |
| | | | | mCfUmUfCpsmUpsmU | | psmU |
| 147 | 1049 | 530 | 548 | fApsmUpsfGmCfCmAfAmAfAmCfAmAfCmCfA | 1631 | mGpsfUpsmGfAmUfGmGfUmUfGmUfUmUfUmGfGmCfAmUpsmU |
| | | | | mUfCmAfCpsmUpsmU | | psmU |
| 148 | 1050 | 531 | 549 | fUpsmGpsfCmCfAmAfAmAfCmAfAmCfCmAfU | 1632 | mGpsfGpsmUfGmAfUmGfGmUfUmGfUmUfUmUfGmGfCmApsmU |
| | | | | mCfAmCfCpsmUpsmU | | psmU |
| 149 | 1051 | 532 | 550 | fGpsmCpsfCmAfAmAfAmCfAmAfCmCfAmUfC | 1633 | mCpsfGpsmGfUmGfAmUfGmGfUmUfGmUfUmUfUmGfGmCpsmU |
| | | | | mAfCmCfGpsmUpsmU | | psmU |
| 150 | 1052 | 535 | 553 | fApsmApsfAmAfCmAfAmCfCmAfUmCfAmCfC | 1634 | mApsfCpsmAfCmGfGmUfGmAfUmGfGmUfUmGfUmUfUmUpsmU |
| | | | | mGfUmGfUpsmUpsmU | | psmU |
| 151 | 1053 | 536 | 554 | fApsmApsfAmCfAmAfCmCfAmUfCmAfCmCfG | 1635 | mGpsfApsmCfAmCfGmGfUmGfAmUfGmGfUmUfGmUfUmUpsmU |
| | | | | mUfGmUfCpsmUpsmU | | psmU |
| 152 | 1054 | 538 | 556 | fApsmCpsfAmAfCmCfAmUfCmAfCmCfGmUfG | 1636 | mGpsfGpsmGfAmCfAmCfGmGfUmGfAmUfGmGfUmUfGmUpsmU |
| | | | | mUfCmCfCpsmUpsmU | | psmU |
| 153 | 1055 | 539 | 557 | fCpsmApsfAmCfCmAfUmCfAmCfCmGfUmGfU | 1637 | mGpsfGpsmGfGmAfCmAfCmGfGmUfGmAfUmGfGmUfUmGpsmU |
| | | | | mCfCmCfCpsmUpsmU | | psmU |
| 154 | 1056 | 540 | 558 | fApsmApsfCmCfAmUfCmAfCmCfGmUfGmUfC | 1638 | mGpsfGpsmGfGmGfAmCfAmCfGmGfUmGfAmUfGmGfUmUpsmU |
| | | | | mCfCmCfCpsmUpsmU | | psmU |
| 155 | 1057 | 546 | 564 | fCpsmApsfCmCfGmUfGmUfCmCfCmCfCmUfU | 1639 | mApsfUpsmAfGmAfAmGfGmGfGmGfAmCfAmCfGmGfUmGpsmU |
| | | | | mCfUmAfUpsmUpsmU | | psmU |
| 156 | 1058 | 547 | 565 | fApsmCpsfCmGfUmGfUmCfCmCfCmCfUmUfC | 1640 | mCpsfApsmUfAmGfAmAfGmGfGmGfGmAfCmAfCmGfGmUpsmU |
| | | | | mUfAmUfGpsmUpsmU | | psmU |
| 157 | 1059 | 550 | 568 | fGpsmUpsfGmUfCmCfCmCfCmUfUmCfUmAfU | 1641 | mCpsfCpsmCfCmAfUmAfGmAfAmGfGmGfGmGfAmCfAmCpsmUp |
| | | | | mGfGmGfGpsmUpsmU | | smU |
| 158 | 1060 | 551 | 569 | fUpsmGpsfUmCfCmCfCmCfUmUfCmUfAmUfG | 1642 | mUpsfCpsmCfCmCfAmUfAmGfAmAfGmGfGmGfGmAfCmApsmUp |
| | | | | mGfGmGfApsmUpsmU | | smU |
| 159 | 1061 | 552 | 570 | fGpsmUpsfCmCfCmCfCmUfUmCfUmAfUmGfG | 1643 | mCpsfUpsmCfCmCfCmAfUmAfGmAfAmGfGmGfGmGfAmCpsmUp |
| | | | | mGfGmAfGpsmUpsmU | | smU |
| 160 | 1062 | 553 | 571 | fUpsmCpsfCmCfCmCfUmUfCmUfAmUfGmGfG | 1644 | mApsfCpsmUfCmCfCmCfAmUfAmGfAmAfGmGfGmGfGmApsmUp |
| | | | | mGfAmGfUpsmUpsmU | | smU |
| 161 | 1063 | 556 | 574 | fCpsmCpsfCmUfUmCfUmAfUmGfGmGfGmAf | 1645 | mCpsfGpsmUfAmCfUmCfCmCfCmAfUmAfGmAfAmGfGmGpsmUp |
| | | | | GmUfAmCfGpsmUpsmU | | smU |
| 162 | 1064 | 557 | 575 | fCpsmCpsfUmUfCmUfAmUfGmGfGmGfAmGf | 1646 | mUpsfCpsmGfUmAfCmUfCmCfCmCfAmUfAmGfAmAfGmGpsmUp |
| | | | | UmAfCmGfApsmUpsmU | | smU |
| 163 | 1065 | 559 | 577 | fUpsmUpsfCmUfAmUfGmGfGmGfAmGfUmAf | 1647 | mUpsfGpsmUfCmGfUmAfCmUfCmCfCmCfAmUfAmGfAmApsmUp |
| | | | | CmGfAmCfApsmUpsmU | | smU |
| 164 | 1066 | 560 | 578 | fUpsmCpsfUmAfUmGfGmGfGmAfGmUfAmCf | 1648 | mApsfUpsmGfUmCfGmUfAmCfUmCfCmCfCmAfUmAfGmApsmUp |
| | | | | GmAfCmAfUpsmUpsmU | | smU |
| 165 | 1067 | 561 | 579 | fCpsmUpsfAmUfGmGfGmGfAmGfUmAfCmGf | 1649 | mGpsfApsmUfGmUfCmGfUmAfCmUfCmCfCmCfAmUfAmGpsmUp |
| | | | | AmCfAmUfCpsmUpsmU | | smU |
| 166 | 1068 | 562 | 580 | fUpsmApsfUmGfGmGfGmAfGmUfAmCfGmAf | 1650 | mApsfGpsmAfUmGfUmCfGmUfAmCfUmCfCmCfCmAfUmApsmUp |
| | | | | CmAfUmCfUpsmUpsmU | | smU |
| 167 | 1069 | 571 | 589 | fUpsmApsfCmGfAmCfAmUfCmUfGmCfCmCfU | 1651 | mCpsfUpsmUfUmAfGmGfGmCfAmGfAmUfGmUfCmGfUmApsmU |
| | | | | mAfAmAfGpsmUpsmU | | psmU |
| 168 | 1070 | 572 | 590 | fApsmCpsfGmAfCmAfUmCfUmGfCmCfCmUfA | 1652 | mApsfCpsmUfUmUfAmGfGmGfCmAfGmAfUmGfUmCfGmUpsmU |
| | | | | mAfAmGfUpsmUpsmU | | psmU |
| 169 | 1071 | 573 | 591 | fCpsmGpsfAmCfAmUfCmUfGmCfCmCfUmAfA | 1653 | mGpsfApsmCfUmUfUmAfGmGfGmCfAmGfAmUfGmUfCmGpsmU |
| | | | | mAfGmUfCpsmUpsmU | | psmU |
| 170 | 1072 | 574 | 592 | fGpsmApsfCmAfUmCfUmGfCmCfCmUfAmAfA | 1654 | mUpsfGpsmAfCmUfUmUfAmGfGmGfCmAfGmAfUmGfUmCpsmU |
| | | | | mGfUmCfApsmUpsmU | | psmU |
| 171 | 1073 | 575 | 593 | fApsmCpsfAmUfCmUfGmCfCmCfUmAfAmAfG | 1655 | mUpsfUpsmGfAmCfUmUfUmAfGmGfGmCfAmGfAmUfGmUpsmU |
| | | | | mUfCmAfApsmUpsmU | | psmU |
| 172 | 1074 | 576 | 594 | fCpsmApsfUmCfUmGfCmCfCmUfAmAfAmGfU | 1656 | mCpsfUpsmUfGmAfCmUfUmUfAmGfGmGfCmAfGmAfUmGpsmU |
| | | | | mCfAmAfGpsmUpsmU | | psmU |
| 173 | 1075 | 577 | 595 | fApsmUpsfCmUfGmCfCmCfUmAfAmAfGmUfC | 1657 | mApsfCpsmUfUmGfAmCfUmUfUmAfGmGfGmCfAmGfAmUpsmU |
| | | | | mAfAmGfUpsmUpsmU | | psmU |
| 174 | 1076 | 582 | 600 | fCpsmCpsfCmUfAmAfAmGfUmCfAmAfGmUfC | 1658 | mCpsfGpsmUfGmGfAmCfUmUfGmAfCmUfUmUfAmGfGmGpsmU |
| | | | | mCfAmCfGpsmUpsmU | | psmU |
| 175 | 1077 | 583 | 601 | fCpsmCpsfUmAfAmAfGmUfCmAfAmGfUmCfC | 1659 | mUpsfCpsmGfUmGfGmAfCmUfUmGfAmCfUmUfUmAfGmGpsmU |
| | | | | mAfCmGfApsmUpsmU | | psmU |
| 176 | 1078 | 585 | 603 | fUpsmApsfAmAfGmUfCmAfAmGfUmCfCmAfC | 1660 | mGpsfUpsmUfCmGfUmGfGmAfCmUfUmGfAmCfUmUfUmApsmU |
| | | | | mGfAmAfCpsmUpsmU | | psmU |
| 177 | 1079 | 586 | 604 | fApsmApsfAmGfUmCfAmAfGmUfCmCfAmCfG | 1661 | mApsfGpsmUfUmCfGmUfGmGfAmCfUmUfGmAfCmUfUmUpsmU |
| | | | | mAfAmCfUpsmUpsmU | | psmU |
| 178 | 1080 | 587 | 605 | fApsmApsfGmUfCmAfAmGfUmCfCmAfCmGfA | 1662 | mApsfApsmGfUmUfCmGfUmGfGmAfCmUfUmGfAmCfUmUpsmU |
| | | | | mAfCmUfUpsmUpsmU | | psmU |
| 179 | 1081 | 588 | 606 | fApsmGpsfUmCfAmAfGmUfCmCfAmCfGmAfA | 1663 | mApsfApsmAfGmUfUmCfGmUfGmGfAmCfUmUfGmAfCmUpsmU |
| | | | | mCfUmUfUpsmUpsmU | | psmU |
| 180 | 1082 | 589 | 607 | fGpsmUpsfCmAfAmGfUmCfCmAfCmGfAmAfC | 1664 | mGpsfApsmAfAmGfUmUfCmGfUmGfGmAfCmUfUmGfAmCpsmU |
| | | | | mUfUmUfCpsmUpsmU | | psmU |
| 181 | 1083 | 590 | 608 | fUpsmCpsfAmAfGmUfCmCfAmCfGmAfAmCfU | 1665 | mApsfGpsmAfAmAfGmUfUmCfGmUfGmGfAmCfUmUfGmApsmU |
| | | | | mUfUmCfUpsmUpsmU | | psmU |
| 182 | 1084 | 591 | 609 | fCpsmApsfAmGfUmCfCmAfCmGfAmAfCmUfU | 1666 | mApsfApsmGfAmAfAmGfUmUfCmGfUmGfGmAfCmUfUmGpsmU |
| | | | | mUfCmUfUpsmUpsmU | | psmU |
| 183 | 1085 | 592 | 610 | fApsmApsfGmUfCmCfAmCfGmAfAmCfUmUfU | 1667 | mGpsfApsmAfGmAfAmAfGmUfUmCfGmUfGmGfAmCfUmUpsmU |
| | | | | mCfUmUfCpsmUpsmU | | psmU |
| 184 | 1086 | 593 | 611 | fApsmGpsfUmCfCmAfCmGfAmAfCmUfUmUfC | 1668 | mUpsfGpsmAfAmGfAmAfAmGfUmUfCmGfUmGfGmAfCmUpsmU |
| | | | | mUfUmCfApsmUpsmU | | psmU |
| 185 | 1087 | 594 | 612 | fGpsmUpsfCmCfAmCfGmAfAmCfUmUfUmCfU | 1669 | mApsfUpsmGfAmAfGmAfAmAfGmUfUmCfGmUfGmGfAmCpsmU |
| | | | | mUfCmAfUpsmUpsmU | | psmU |
| 186 | 1088 | 595 | 613 | fUpsmCpsfCmAfCmGfAmAfCmUfUmUfCmUfU | 1670 | mCpsfApsmUfGmAfAmGfAmAfAmGfUmUfCmGfUmGfGmApsmU |
| | | | | mCfAmUfGpsmUpsmU | | psmU |
| 187 | 1089 | 597 | 615 | fCpsmApsfCmGfAmAfCmUfUmUfCmUfUmCfA | 1671 | mCpsfApsmCfAmUfGmAfAmGfAmAfAmGfUmUfCmGfUmGpsmU |
| | | | | mUfGmUfGpsmUpsmU | | psmU |
| 188 | 1090 | 620 | 638 | fUpsmCpsfAmCfCmAfAmGfCmUfCmAfGmUfC | 1672 | mCpsfGpsmUfAmGfAmCfUmGfAmGfCmUfUmGfGmUfGmApsmU |
| | | | | mUfAmCfGpsmUpsmU | | psmU |
| 189 | 1091 | 621 | 639 | fCpsmApsfCmCfAmAfGmCfUmCfAmGfUmCfU | 1673 | mGpsfCpsmGfUmAfGmAfCmUfGmAfGmCfUmUfGmGfUmGpsmU |
| | | | | mAfCmGfCpsmUpsmU | | psmU |
| 190 | 1092 | 622 | 640 | fApsmCpsfCmAfAmGfCmUfCmAfGmUfCmUfA | 1674 | mGpsfGpsmCfGmUfAmGfAmCfUmGfAmGfCmUfUmGfGmUpsmU |
| | | | | mCfGmCfCpsmUpsmU | | psmU |
| 191 | 1093 | 623 | 641 | fCpsmCpsfAmAfGmCfUmCfAmGfUmCfUmAfC | 1675 | mApsfGpsmGfCmGfUmAfGmAfCmUfGmAfGmCfUmUfGmGpsmU |
| | | | | mGfCmCfUpsmUpsmU | | psmU |
| 192 | 1094 | 624 | 642 | fCpsmApsfAmGfCmUfCmAfGmUfCmUfAmCfG | 1676 | mGpsfApsmGfGmCfGmUfAmGfAmCfUmGfAmGfCmUfUmGpsmU |
| | | | | mCfCmUfCpsmUpsmU | | psmU |
| 193 | 1095 | 626 | 644 | fApsmGpsfCmUfCmAfGmUfCmUfAmCfGmCfC | 1677 | mCpsfApsmGfAmGfGmCfGmUfAmGfAmCfUmGfAmGfCmUpsmUp |
| | | | | mUfCmUfGpsmUpsmU | | smU |
| 194 | 1096 | 630 | 648 | fCpsmApsfGmUfCmUfAmCfGmCfCmUfCmUfG | 1678 | mUpsfGpsmUfGmCfAmGfAmGfGmCfGmUfAmGfAmCfUmGpsmU |
| | | | | mCfAmCfApsmUpsmU | | psmU |
| 195 | 1097 | 631 | 649 | fApsmGpsfUmCfUmAfCmGfCmCfUmCfUmGfC | 1679 | mCpsfUpsmGfUmGfCmAfGmAfGmGfCmGfUmAfGmAfCmUpsmU |
| | | | | mAfCmAfGpsmUpsmU | | psmU |
| 196 | 1098 | 636 | 654 | fApsmCpsfGmCfCmUfCmUfGmCfAmCfAmGfG | 1680 | mGpsfUpsmUfCmCfCmUfGmUfGmCfAmGfAmGfGmCfGmUpsmU |
| | | | | mGfAmAfCpsmUpsmU | | psmU |
| 197 | 1099 | 642 | 660 | fCpsmUpsfGmCfAmCfAmGfGmGfAmAfCmCfU | 1681 | mGpsfUpsmAfGmAfGmGfUmUfCmCfCmUfGmUfGmCfAmGpsmU |
| | | | | mCfUmAfCpsmUpsmU | | psmU |
| 198 | 1100 | 643 | 661 | fUpsmGpsfCmAfCmAfGmGfGmAfAmCfCmUfC | 1682 | mGpsfGpsmUfAmGfAmGfGmUfUmCfCmCfUmGfUmGfCmApsmU |
| | | | | mUfAmCfCpsmUpsmU | | psmU |
| 199 | 1101 | 646 | 664 | fApsmCpsfAmGfGmGfAmAfCmCfUmCfUmAfC | 1683 | mGpsfApsmAfGmGfUmAfGmAfGmGfUmUfCmCfCmUfGmUpsmU |
| | | | | mCfUmUfCpsmUpsmU | | psmU |
| 200 | 1102 | 691 | 709 | fCpsmUpsfCmAfAmGfGmUfGmCfUmGfGmGf | 1684 | mUpsfCpsmUfCmUfCmCfCmAfGmCfAmCfCmUfUmGfAmGpsmUp |
| | | | | AmGfAmGfApsmUpsmU | | smU |
| 201 | 1103 | 694 | 712 | fApsmApsfGmGfUmGfCmUfGmGfGmAfGmAf | 1685 | mApsfUpsmAfUmCfUmCfUmCfCmCfAmGfCmAfCmCfUmUpsmUp |
| | | | | GmAfUmAfUpsmUpsmU | | smU |
| 202 | 1104 | 695 | 713 | fApsmGpsfGmUfGmCfUmGfGmGfAmGfAmGf | 1686 | mCpsfApsmUfAmUfCmUfCmUfCmCfCmAfGmCfAmCfCmUpsmUps |
| | | | | AmUfAmUfGpsmUpsmU | | mU |
| 203 | 1105 | 696 | 714 | fGpsmGpsfUmGfCmUfGmGfGmAfGmAfGmAf | 1687 | mGpsfCpsmAfUmAfUmCfUmCfUmCfCmCfAmGfCmAfCmCpsmUps |
| | | | | UmAfUmGfCpsmUpsmU | | mU |
| 204 | 1106 | 697 | 715 | fGpsmUpsfGmCfUmGfGmGfAmGfAmGfAmUf | 1688 | mGpsfGpsmCfAmUfAmUfCmUfCmUfCmCfCmAfGmCfAmCpsmUp |
| | | | | AmUfGmCfCpsmUpsmU | | smU |
| 205 | 1107 | 698 | 716 | fUpsmGpsfCmUfGmGfGmAfGmAfGmAfUmAf | 1689 | mApsfGpsmGfCmAfUmAfUmCfUmCfUmCfCmCfAmGfCmApsmUp |
| | | | | UmGfCmCfUpsmUpsmU | | smU |
| 206 | 1108 | 703 | 721 | fGpsmGpsfAmGfAmGfAmUfAmUfGmCfCmUf | 1690 | mCpsfUpsmCfGmAfAmGfGmCfAmUfAmUfCmUfCmUfCmCpsmUp |
| | | | | UmCfGmAfGpsmUpsmU | | smU |
| 207 | 1109 | 735 | 753 | fApsmUpsfUmCfAmGfGmUfUmCfUmUfGmGf | 1691 | mCpsfUpsmCfUmUfCmCfAmAfGmAfAmCfCmUfGmAfAmUpsmUp |
| | | | | AmAfGmAfGpsmUpsmU | | smU |
| 208 | 1110 | 737 | 755 | fUpsmCpsfAmGfGmUfUmCfUmUfGmGfAmAf | 1692 | mUpsfUpsmCfUmCfUmUfCmCfAmAfGmAfAmCfCmUfGmApsmUp |
| | | | | GmAfGmAfApsmUpsmU | | smU |
| 209 | 1111 | 743 | 761 | fUpsmCpsfUmUfGmGfAmAfGmAfGmAfAmGf | 1693 | mApsfUpsmGfCmCfCmUfUmCfUmCfUmUfCmCfAmAfGmApsmUp |
| | | | | GmGfCmAfUpsmUpsmU | | smU |
| 210 | 1112 | 744 | 762 | fCpsmUpsfUmGfGmAfAmGfAmGfAmAfGmGf | 1694 | mGpsfApsmUfGmCfCmCfUmUfCmUfCmUfUmCfCmAfAmGpsmUp |
| | | | | GmCfAmUfCpsmUpsmU | | smU |
| 211 | 1113 | 745 | 763 | fUpsmUpsfGmGfAmAfGmAfGmAfAmGfGmGf | 1695 | mApsfGpsmAfUmGfCmCfCmUfUmCfUmCfUmUfCmCfAmApsmUp |
| | | | | CmAfUmCfUpsmUpsmU | | smU |
| 212 | 1114 | 747 | 765 | fGpsmGpsfAmAfGmAfGmAfAmGfGmGfCmAf | 1696 | mGpsfCpsmAfGmAfUmGfCmCfCmUfUmCfUmCfUmUfCmCpsmUp |
| | | | | UmCfUmGfCpsmUpsmU | | smU |
| 213 | 1115 | 748 | 766 | fGpsmApsfAmGfAmGfAmAfGmGfGmCfAmUf | 1697 | mUpsfGpsmCfAmGfAmUfGmCfCmCfUmUfCmUfCmUfUmCpsmUp |
| | | | | CmUfGmCfApsmUpsmU | | smU |
| 214 | 1116 | 749 | 767 | fApsmApsfGmAfGmAfAmGfGmGfCmAfUmCf | 1698 | mUpsfUpsmGfCmAfGmAfUmGfCmCfCmUfUmCfUmCfUmUpsmU |
| | | | | UmGfCmAfApsmUpsmU | | psmU |
| 215 | 1117 | 752 | 770 | fApsmGpsfAmAfGmGfGmCfAmUfCmUfGmCfA | 1699 | mCpsfUpsmGfUmUfGmCfAmGfAmUfGmCfCmCfUmUfCmUpsmU |
| | | | | mAfCmAfGpsmUpsmU | | psmU |
| 216 | 1118 | 755 | 773 | fApsmGpsfGmGfCmAfUmCfUmGfCmAfAmCfA | 1700 | mGpsfGpsmCfCmUfGmUfUmGfCmAfGmAfUmGfCmCfCmUpsmUp |
| | | | | mGfGmCfCpsmUpsmU | | smU |
| 217 | 1119 | 758 | 776 | fGpsmCpsfAmUfCmUfGmCfAmAfCmAfGmGfC | 1701 | mUpsfGpsmGfGmGfCmCfUmGfUmUfGmCfAmGfAmUfGmCpsmU |
| | | | | mCfCmCfApsmUpsmU | | psmU |
| 218 | 1120 | 977 | 995 | fCpsmApsfGmCfAmCfUmGfAmGfUmGfAmAfG | 1702 | mApsfUpsmUfUmCfUmUfCmAfCmUfCmAfGmUfGmCfUmGpsmU |
| | | | | mAfAmAfUpsmUpsmU | | psmU |
| 219 | 1121 | 1026 | 1044 | fUpsmUpsfGmCfAmAfCmUfUmGfCmUfAmCfC | 1703 | mApsfApsmUfGmGfGmUfAmGfCmAfAmGfUmUfGmCfAmApsmU |
| | | | | mCfAmUfUpsmUpsmU | | psmU |
| 220 | 1122 | 1035 | 1053 | fGpsmCpsfUmAfCmCfCmAfUmUfAmGfGmAfU | 1704 | mCpsfApsmUfUmAfUmCfCmUfAmAfUmGfGmGfUmAfGmCpsmU |
| | | | | mAfAmUfGpsmUpsmU | | psmU |
| 221 | 1123 | 1038 | 1056 | fApsmCpsfCmCfAmUfUmAfGmGfAmUfAmAfU | 1705 | mApsfGpsmAfCmAfUmUfAmUfCmCfUmAfAmUfGmGfGmUpsmU |
| | | | | mGfUmCfUpsmUpsmU | | psmU |
| 222 | 1124 | 1039 | 1057 | fCpsmCpsfCmAfUmUfAmGfGmAfUmAfAmUfG | 1706 | mApsfApsmGfAmCfAmUfUmAfUmCfCmUfAmAfUmGfGmGpsmU |
| | | | | mUfCmUfUpsmUpsmU | | psmU |
| 223 | 1125 | 1041 | 1059 | fCpsmApsfUmUfAmGfGmAfUmAfAmUfGmUf | 1707 | mApsfUpsmAfAmGfAmCfAmUfUmAfUmCfCmUfAmAfUmGpsmUp |
| | | | | CmUfUmAfUpsmUpsmU | | smU |
| 224 | 1126 | 1064 | 1082 | fUpsmGpsfCmUfGmCfCmCfUmGfUmAfCmCfC | 1708 | mGpsfGpsmCfAmGfGmGfUmAfCmAfGmGfGmCfAmGfCmApsmUp |
| | | | | mUfGmCfCpsmUpsmU | | smU |
| 225 | 1127 | 1068 | 1086 | fGpsmCpsfCmCfUmGfUmAfCmCfCmUfGmCfC | 1709 | mCpsfApsmCfAmGfGmCfAmGfGmGfUmAfCmAfGmGfGmCpsmUp |
| | | | | mUfGmUfGpsmUpsmU | | smU |
| 226 | 1128 | 1077 | 1095 | fCpsmCpsfUmGfCmCfUmGfUmGfGmAfAmUfC | 1710 | mGpsfGpsmCfAmGfAmUfUmCfCmAfCmAfGmGfCmAfGmGpsmUp |
| | | | | mUfGmCfCpsmUpsmU | | smU |
| 227 | 1129 | 1080 | 1098 | fGpsmCpsfCmUfGmUfGmGfAmAfUmCfUmGf | 1711 | mApsfApsmUfGmGfCmAfGmAfUmUfCmCfAmCfAmGfGmCpsmUp |
| | | | | CmCfAmUfUpsmUpsmU | | smU |
| 228 | 1130 | 1111 | 1129 | fApsmGpsfAmCfUmGfGmUfGmAfCmAfUmGf | 1712 | mGpsfApsmAfGmCfCmAfUmGfUmCfAmCfCmAfGmUfCmUpsmUp |
| | | | | GmCfUmUfCpsmUpsmU | | smU |
| 229 | 1131 | 1196 | 1214 | fUpsmGpsfUmGfUmCfUmGfCmUfCmCfCmCfG | 1713 | mGpsfApsmGfGmCfGmGfGmGfAmGfCmAfGmAfCmAfCmApsmUp |
| | | | | mCfCmUfCpsmUpsmU | | smU |
| 230 | 1132 | 1198 | 1216 | fUpsmGpsfUmCfUmGfCmUfCmCfCmCfGmCfC | 1714 | mUpsfGpsmGfAmGfGmCfGmGfGmGfAmGfCmAfGmAfCmApsmU |
| | | | | mUfCmCfApsmUpsmU | | psmU |
| 231 | 1133 | 1 | 21 | fApsmUpsfGmUfAmCfGmAfCmGfCmAfGmAfG | 1715 | vmGpsfCpsmCfGmCfGmCfUmCfUmGfCmGfUmCfGmUfAmCfAmU |
| | | | | mCfGmCfGmGpsfC | | psmUpsmU |
| 232 | 1134 | 3 | 23 | fGpsmUpsfAmCfGmAfCmGfCmAfGmAfGmCfG | 1716 | vmCpsfApsmGfCmCfGmCfGmCfUmCfUmGfCmGfUmCfGmUfAmC |
| | | | | mCfGmGfCmUpsfG | | psmUpsmU |
| 233 | 1135 | 4 | 24 | fUpsmApsfCmGfAmCfGmCfAmGfAmGfCmGfC | 1717 | vmCpsfCpsmAfGmCfCmGfCmGfCmUfCmUfGmCfGmUfCmGfUmA |
| | | | | mGfGmCfUmGpsfG | | psmUpsmU |
| 234 | 1136 | 5 | 25 | fApsmCpsfGmAfCmGfCmAfGmAfGmCfGmCfG | 1718 | vmUpsfCpsmCfAmGfCmCfGmCfGmCfUmCfUmGfCmGfUmCfGmU |
| | | | | mGfCmUfGmGpsfA | | psmUpsmU |
| 235 | 1137 | 8 | 28 | fApsmCpsfGmCfAmGfAmGfCmGfCmGfGmCfU | 1719 | vmApsfGpsmCfUmCfCmAfGmCfCmGfCmGfCmUfCmUfGmCfGmU |
| | | | | mGfGmAfGmCpsfU | | psmUpsmU |
| 236 | 1138 | 9 | 29 | fCpsmGpsfCmAfGmAfGmCfGmCfGmGfCmUfG | 1720 | vmApsfApsmGfCmUfCmCfAmGfCmCfGmCfGmCfUmCfUmGfCmG |
| | | | | mGfAmGfCmUpsfU | | psmUpsmU |
| 237 | 1139 | 10 | 30 | fGpsmCpsfAmGfAmGfCmGfCmGfGmCfUmGf | 1721 | vmCpsfApsmAfGmCfUmCfCmAfGmCfCmGfCmGfCmUfCmUfGmCp |
| | | | | GmAfGmCfUmUpsfG | | smUpsmU |
| 238 | 1140 | 11 | 31 | fCpsmApsfGmAfGmCfGmCfGmGfCmUfGmGfA | 1722 | vmApsfCpsmAfAmGfCmUfCmCfAmGfCmCfGmCfGmCfUmCfUmG |
| | | | | mGfCmUfUmGpsfU | | psmUpsmU |
| 239 | 1141 | 12 | 32 | fApsmGpsfAmGfCmGfCmGfGmCfUmGfGmAf | 1723 | vmGpsfApsmCfAmAfGmCfUmCfCmAfGmCfCmGfCmGfCmUfCmU |
| | | | | GmCfUmUfGmUpsfC | | psmUpsmU |
| 240 | 1142 | 13 | 33 | fGpsmApsfGmCfGmCfGmGfCmUfGmGfAmGf | 1724 | vmGpsfGpsmAfCmAfAmGfCmUfCmCfAmGfCmCfGmCfGmCfUmC |
| | | | | CmUfUmGfUmCpsfC | | psmUpsmU |
| 241 | 1143 | 15 | 35 | fGpsmCpsfGmCfGmGfCmUfGmGfAmGfCmUf | 1725 | vmApsfApsmGfGmAfCmAfAmGfCmUfCmCfAmGfCmCfGmCfGmCp |
| | | | | UmGfUmCfCmUpsfU | | smUpsmU |
| 242 | 1144 | 17 | 37 | fGpsmCpsfGmGfCmUfGmGfAmGfCmUfUmGf | 1726 | vmCpsfGpsmAfAmGfGmAfCmAfAmGfCmUfCmCfAmGfCmCfGmCp |
| | | | | UmCfCmUfUmCpsfG | | smUpsmU |
| 243 | 1145 | 20 | 40 | fGpsmCpsfUmGfGmAfGmCfUmUfGmUfCmCf | 1727 | vmCpsfCpsmGfCmGfAmAfGmGfAmCfAmAfGmCfUmCfCmAfGmCp |
| | | | | UmUfCmGfCmGpsfG | | smUpsmU |
| 244 | 1146 | 22 | 42 | fUpsmGpsfGmAfGmCfUmUfGmUfCmCfUmUf | 1728 | vmGpsfCpsmCfCmGfCmGfAmAfGmGfAmCfAmAfGmCfUmCfCmAp |
| | | | | CmGfCmGfGmGpsfC | | smUpsmU |
| 245 | 1147 | 23 | 43 | fGpsmGpsfAmGfCmUfUmGfUmCfCmUfUmCf | 1729 | vmApsfGpsmCfCmCfGmCfGmAfAmGfGmAfCmAfAmGfCmUfCmCp |
| | | | | GmCfGmGfGmCpsfU | | smUpsmU |
| 246 | 1148 | 24 | 44 | fGpsmApsfGmCfUmUfGmUfCmCfUmUfCmGf | 1730 | vmCpsfApsmGfCmCfCmGfCmGfAmAfGmGfAmCfAmAfGmCfUmCp |
| | | | | CmGfGmGfCmUpsfG | | smUpsmU |
| 247 | 1149 | 25 | 45 | fApsmGpsfCmUfUmGfUmCfCmUfUmCfGmCf | 1731 | vmGpsfCpsmAfGmCfCmCfGmCfGmAfAmGfGmAfCmAfAmGfCmU |
| | | | | GmGfGmCfUmGpsfC | | psmUpsmU |
| 248 | 1150 | 28 | 48 | fUpsmUpsfGmUfCmCfUmUfCmGfCmGfGmGf | 1732 | vmGpsfCpsmCfGmCfAmGfCmCfCmGfCmGfAmAfGmGfAmCfAmAp |
| | | | | CmUfGmCfGmGpsfC | | smUpsmU |
| 249 | 1151 | 29 | 49 | fUpsmGpsfUmCfCmUfUmCfGmCfGmGfGmCf | 1733 | vmApsfGpsmCfCmGfCmAfGmCfCmCfGmCfGmAfAmGfGmAfCmAp |
| | | | | UmGfCmGfGmCpsfU | | smUpsmU |
| 250 | 1152 | 30 | 50 | fGpsmUpsfCmCfUmUfCmGfCmGfGmGfCmUf | 1734 | vmApsfApsmGfCmCfGmCfAmGfCmCfCmGfCmGfAmAfGmGfAmCp |
| | | | | GmCfGmGfCmUpsfU | | smUpsmU |
| 251 | 1153 | 40 | 60 | fGpsmGpsfCmUfGmCfGmGfCmUfUmCfCmUf | 1735 | vmGpsfApsmAfGmCfCmCfAmGfGmAfAmGfCmCfGmCfAmGfCmCp |
| | | | | GmGfGmCfUmUpsfC | | smUpsmU |
| 252 | 1154 | 41 | 61 | fGpsmCpsfUmGfCmGfGmCfUmUfCmCfUmGf | 1736 | vmApsfGpsmAfAmGfCmCfCmAfGmGfAmAfGmCfCmGfCmAfGmC |
| | | | | GmGfCmUfUmCpsfU | | psmUpsmU |
| 253 | 1155 | 42 | 62 | fCpsmUpsfGmCfGmGfCmUfUmCfCmUfGmGf | 1737 | vmUpsfApsmGfAmAfGmCfCmCfAmGfGmAfAmGfCmCfGmCfAmG |
| | | | | GmCfUmUfCmUpsfA | | psmUpsmU |
| 254 | 1156 | 43 | 63 | fUpsmGpsfCmGfGmCfUmUfCmCfUmGfGmGf | 1738 | vmGpsfUpsmAfGmAfAmGfCmCfCmAfGmGfAmAfGmCfCmGfCmA |
| | | | | CmUfUmCfUmApsfC | | psmUpsmU |
| 255 | 1157 | 44 | 64 | fGpsmCpsfGmGfCmUfUmCfCmUfGmGfGmCf | 1739 | vmGpsfGpsmUfAmGfAmAfGmCfCmCfAmGfGmAfAmGfCmCfGmC |
| | | | | UmUfCmUfAmCpsfC | | psmUpsmU |
| 256 | 1158 | 48 | 68 | fCpsmUpsfUmCfCmUfGmGfGmCfUmUfCmUf | 1740 | vmApsfCpsmGfUmGfGmUfAmGfAmAfGmCfCmCfAmGfGmAfAmG |
| | | | | AmCfCmAfCmGpsfU | | psmUpsmU |
| 257 | 1159 | 52 | 72 | fCpsmUpsfGmGfGmCfUmUfCmUfAmCfCmAfC | 1741 | vmCpsfCpsmCfGmAfCmGfUmGfGmUfAmGfAmAfGmCfCmCfAmG |
| | | | | mGfUmCfGmGpsfG | | psmUpsmU |
| 258 | 1160 | 53 | 73 | fUpsmGpsfGmGfCmUfUmCfUmAfCmCfAmCfG | 1742 | vmCpsfCpsmCfCmGfAmCfGmUfGmGfUmAfGmAfAmGfCmCfCmA |
| | | | | mUfCmGfGmGpsfG | | psmUpsmU |
| 259 | 1161 | 55 | 75 | fGpsmGpsfCmUfUmCfUmAfCmCfAmCfGmUfC | 1743 | vmCpsfGpsmCfCmCfCmGfAmCfGmUfGmGfUmAfGmAfAmGfCmC |
| | | | | mGfGmGfGmCpsfG | | psmUpsmU |
| 260 | 1162 | 56 | 76 | fGpsmCpsfUmUfCmUfAmCfCmAfCmGfUmCfG | 1744 | vmUpsfCpsmGfCmCfCmCfGmAfCmGfUmGfGmUfAmGfAmAfGmC |
| | | | | mGfGmGfCmGpsfA | | psmUpsmU |
| 261 | 1163 | 57 | 77 | fCpsmUpsfUmCfUmAfCmCfAmCfGmUfCmGfG | 1745 | vmGpsfUpsmCfGmCfCmCfCmGfAmCfGmUfGmGfUmAfGmAfAmG |
| | | | | mGfGmCfGmApsfC | | psmUpsmU |
| 262 | 1164 | 58 | 78 | fUpsmUpsfCmUfAmCfCmAfCmGfUmCfGmGfG | 1746 | vmGpsfGpsmUfCmGfCmCfCmCfGmAfCmGfUmGfGmUfAmGfAmA |
| | | | | mGfCmGfAmCpsfC | | psmUpsmU |
| 263 | 1165 | 60 | 80 | fCpsmUpsfAmCfCmAfCmGfUmCfGmGfGmGfC | 1747 | vmCpsfGpsmGfGmUfCmGfCmCfCmCfGmAfCmGfUmGfGmUfAmG |
| | | | | mGfAmCfCmCpsfG | | psmUpsmU |
| 264 | 1166 | 82 | 102 | fUpsmGpsfCmCfUmGfAmGfCmGfAmGfCmAfC | 1748 | vmCpsfGpsmGfGmGfCmGfUmGfCmUfCmGfCmUfCmAfGmGfCmA |
| | | | | mGfCmCfCmCpsfG | | psmUpsmU |
| 265 | 1167 | 83 | 103 | fGpsmCpsfCmUfGmAfGmCfGmAfGmCfAmCfG | 1749 | vmGpsfCpsmGfGmGfGmCfGmUfGmCfUmCfGmCfUmCfAmGfGmC |
| | | | | mCfCmCfCmGpsfC | | psmUpsmU |
| 266 | 1168 | 86 | 106 | fUpsmGpsfAmGfCmGfAmGfCmAfCmGfCmCfC | 1750 | vmGpsfGpsmUfGmCfGmGfGmGfCmGfUmGfCmUfCmGfCmUfCmA |
| | | | | mCfGmCfAmCpsfC | | psmUpsmU |
| 267 | 1169 | 88 | 108 | fApsmGpsfCmGfAmGfCmAfCmGfCmCfCmCfG | 1751 | vmGpsfApsmGfGmUfGmCfGmGfGmGfCmGfUmGfCmUfCmGfCm |
| | | | | mCfAmCfCmUpsfC | | UpsmUpsmU |
| 268 | 1170 | 89 | 109 | fGpsmCpsfGmAfGmCfAmCfGmCfCmCfCmGfC | 1752 | vmGpsfGpsmAfGmGfUmGfCmGfGmGfGmCfGmUfGmCfUmCfGm |
| | | | | mAfCmCfUmCpsfC | | CpsmUpsmU |
| 269 | 1171 | 91 | 111 | fGpsmApsfGmCfAmCfGmCfCmCfCmGfCmAfC | 1753 | vmGpsfApsmGfGmAfGmGfUmGfCmGfGmGfGmCfGmUfGmCfUm |
| | | | | mCfUmCfCmUpsfC | | CpsmUpsmU |
| 270 | 1172 | 96 | 116 | fCpsmGpsfCmCfCmCfGmCfAmCfCmUfCmCfU | 1754 | vmUpsfCpsmGfCmGfGmAfGmGfAmGfGmUfGmCfGmGfGmGfCm |
| | | | | mCfCmGfCmGpsfA | | GpsmUpsmU |
| 271 | 1173 | 97 | 117 | fGpsmCpsfCmCfCmGfCmAfCmCfUmCfCmUfC | 1755 | vmGpsfUpsmCfGmCfGmGfAmGfGmAfGmGfUmGfCmGfGmGfGm |
| | | | | mCfGmCfGmApsfC | | CpsmUpsmU |
| 272 | 1174 | 98 | 118 | fCpsmCpsfCmCfGmCfAmCfCmUfCmCfUmCfC | 1756 | vmCpsfGpsmUfCmGfCmGfGmAfGmGfAmGfGmUfGmCfGmGfGm |
| | | | | mGfCmGfAmCpsfG | | GpsmUpsmU |
| 273 | 1175 | 99 | 119 | fCpsmCpsfCmGfCmAfCmCfUmCfCmUfCmCfG | 1757 | vmGpsfCpsmGfUmCfGmCfGmGfAmGfGmAfGmGfUmGfCmGfGm |
| | | | | mCfGmAfCmGpsfC | | GpsmUpsmU |
| 274 | 1176 | 100 | 120 | fCpsmCpsfGmCfAmCfCmUfCmCfUmCfCmGfC | 1758 | vmCpsfGpsmCfGmUfCmGfCmGfGmAfGmGfAmGfGmUfGmCfGmG |
| | | | | mGfAmCfGmCpsfG | | psmUpsmU |
| 275 | 1177 | 101 | 121 | fCpsmGpsfCmAfCmCfUmCfCmUfCmCfGmCfG | 1759 | vmGpsfCpsmGfCmGfUmCfGmCfGmGfAmGfGmAfGmGfUmGfCmG |
| | | | | mAfCmGfCmGpsfC | | psmUpsmU |
| 276 | 1178 | 103 | 123 | fCpsmApsfCmCfUmCfCmUfCmCfGmCfGmAfC | 1760 | vmGpsfCpsmGfCmGfCmGfUmCfGmCfGmGfAmGfGmAfGmGfUmG |
| | | | | mGfCmGfCmGpsfC | | psmUpsmU |
| 277 | 1179 | 105 | 125 | fCpsmCpsfUmCfCmUfCmCfGmCfGmAfCmGfC | 1761 | vmApsfUpsmGfCmGfCmGfCmGfUmCfGmCfGmGfAmGfGmAfGmG |
| | | | | mGfCmGfCmApsfU | | psmUpsmU |
| 278 | 1180 | 106 | 126 | fCpsmUpsfCmCfUmCfCmGfCmGfAmCfGmCfG | 1762 | vmCpsfApsmUfGmCfGmCfGmCfGmUfCmGfCmGfGmAfGmGfAmG |
| | | | | mCfGmCfAmUpsfG | | psmUpsmU |
| 279 | 1181 | 107 | 127 | fUpsmCpsfCmUfCmCfGmCfGmAfCmGfCmGfC | 1763 | vmApsfCpsmAfUmGfCmGfCmGfCmGfUmCfGmCfGmGfAmGfGmA |
| | | | | mGfCmAfUmGpsfU | | psmUpsmU |
| 280 | 1182 | 108 | 128 | fCpsmCpsfUmCfCmGfCmGfAmCfGmCfGmCfG | 1764 | vmApsfApsmCfAmUfGmCfGmCfGmCfGmUfCmGfCmGfGmAfGmG |
| | | | | mCfAmUfGmUpsfU | | psmUpsmU |
| 281 | 1183 | 109 | 129 | fCpsmUpsfCmCfGmCfGmAfCmGfCmGfCmGfC | 1765 | vmCpsfApsmAfCmAfUmGfCmGfCmGfCmGfUmCfGmCfGmGfAmG |
| | | | | mAfUmGfUmUpsfG | | psmUpsmU |
| 282 | 1184 | 110 | 130 | fUpsmCpsfCmGfCmGfAmCfGmCfGmCfGmCfA | 1766 | vmApsfCpsmAfAmCfAmUfGmCfGmCfGmCfGmUfCmGfCmGfGmA |
| | | | | mUfGmUfUmGpsfU | | psmUpsmU |
| 283 | 1185 | 111 | 131 | fCpsmCpsfGmCfGmAfCmGfCmGfCmGfCmAfU | 1767 | vmApsfApsmCfAmAfCmAfUmGfCmGfCmGfCmGfUmCfGmCfGmG |
| | | | | mGfUmUfGmUpsfU | | psmUpsmU |
| 284 | 1186 | 113 | 133 | fGpsmCpsfGmAfCmGfCmGfCmGfCmAfUmGfU | 1768 | vmCpsfGpsmAfAmCfAmAfCmAfUmGfCmGfCmGfCmGfUmCfGmC |
| | | | | mUfGmUfUmCpsfG | | psmUpsmU |
| 285 | 1187 | 114 | 134 | fCpsmGpsfAmCfGmCfGmCfGmCfAmUfGmUfU | 1769 | vmCpsfCpsmGfAmAfCmAfAmCfAmUfGmCfGmCfGmCfGmUfCmG |
| | | | | mGfUmUfCmGpsfG | | psmUpsmU |
| 286 | 1188 | 115 | 135 | fGpsmApsfCmGfCmGfCmGfCmAfUmGfUmUf | 1770 | vmGpsfCpsmCfGmAfAmCfAmAfCmAfUmGfCmGfCmGfCmGfUmC |
| | | | | GmUfUmCfGmGpsfC | | psmUpsmU |
| 287 | 1189 | 213 | 233 | fUpsmCpsfUmUfGmUfGmCfGmGfAmAfGmGf | 1771 | vmCpsfUpsmCfCmUfGmGfCmCfUmUfCmCfGmCfAmCfAmAfGmA |
| | | | | CmCfAmGfGmApsfG | | psmUpsmU |
| 288 | 1190 | 214 | 234 | fCpsmUpsfUmGfUmGfCmGfGmAfAmGfGmCf | 1772 | vmApsfCpsmUfCmCfUmGfGmCfCmUfUmCfCmGfCmAfCmAfAmG |
| | | | | CmAfGmGfAmGpsfU | | psmUpsmU |
| 289 | 1191 | 216 | 236 | fUpsmGpsfUmGfCmGfGmAfAmGfGmCfCmAf | 1773 | vmCpsfGpsmAfCmUfCmCfUmGfGmCfCmUfUmCfCmGfCmAfCmAp |
| | | | | GmGfAmGfUmCpsfG | | smUpsmU |
| 290 | 1192 | 218 | 238 | fUpsmGpsfCmGfGmAfAmGfGmCfCmAfGmGf | 1774 | vmUpsfCpsmCfGmAfCmUfCmCfUmGfGmCfCmUfUmCfCmGfCmA |
| | | | | AmGfUmCfGmGpsfA | | psmUpsmU |
| 291 | 1193 | 220 | 240 | fCpsmGpsfGmAfAmGfGmCfCmAfGmGfAmGf | 1775 | vmGpsfUpsmUfCmCfGmAfCmUfCmCfUmGfGmCfCmUfUmCfCmG |
| | | | | UmCfGmGfAmApsfC | | psmUpsmU |
| 292 | 1194 | 223 | 243 | fApsmApsfGmGfCmCfAmGfGmAfGmUfCmGf | 1776 | vmApsfApsmUfGmUfUmCfCmGfAmCfUmCfCmUfGmGfCmCfUmU |
| | | | | GmAfAmCfAmUpsfU | | psmUpsmU |
| 293 | 1195 | 224 | 244 | fApsmGpsfGmCfCmAfGmGfAmGfUmCfGmGf | 1777 | vmCpsfApsmAfUmGfUmUfCmCfGmAfCmUfCmCfUmGfGmCfCmU |
| | | | | AmAfCmAfUmUpsfG | | psmUpsmU |
| 294 | 1196 | 225 | 245 | fGpsmGpsfCmCfAmGfGmAfGmUfCmGfGmAf | 1778 | vmCpsfCpsmAfAmUfGmUfUmCfCmGfAmCfUmCfCmUfGmGfCmC |
| | | | | AmCfAmUfUmGpsfG | | psmUpsmU |
| 295 | 1197 | 229 | 249 | fApsmGpsfGmAfGmUfCmGfGmAfAmCfAmUf | 1779 | vmGpsfApsmUfGmCfCmAfAmUfGmUfUmCfCmGfAmCfUmCfCmU |
| | | | | UmGfGmCfAmUpsfC | | psmUpsmU |
| 296 | 1198 | 311 | 331 | fCpsmCpsfAmAfUmGfUmCfCmAfCmCfAmGfC | 1780 | vmApsfGpsmAfUmGfAmGfCmUfGmGfUmGfGmAfCmAfUmUfGm |
| | | | | mUfCmAfUmCpsfU | | GpsmUpsmU |
| 297 | 1199 | 312 | 332 | fCpsmApsfAmUfGmUfCmCfAmCfCmAfGmCfU | 1781 | vmGpsfApsmGfAmUfGmAfGmCfUmGfGmUfGmGfAmCfAmUfUm |
| | | | | mCfAmUfCmUpsfC | | GpsmUpsmU |
| 298 | 1200 | 314 | 334 | fApsmUpsfGmUfCmCfAmCfCmAfGmCfUmCfA | 1782 | vmCpsfGpsmGfAmGfAmUfGmAfGmCfUmGfGmUfGmGfAmCfAm |
| | | | | mUfCmUfCmCpsfG | | UpsmUpsmU |
| 299 | 1201 | 315 | 335 | fUpsmGpsfUmCfCmAfCmCfAmGfCmUfCmAfU | 1783 | vmCpsfCpsmGfGmAfGmAfUmGfAmGfCmUfGmGfUmGfGmAfCmA |
| | | | | mCfUmCfCmGpsfG | | psmUpsmU |
| 300 | 1202 | 316 | 336 | fGpsmUpsfCmCfAmCfCmAfGmCfUmCfAmUfC | 1784 | vmGpsfCpsmCfGmGfAmGfAmUfGmAfGmCfUmGfGmUfGmGfAmC |
| | | | | mUfCmCfGmGpsfC | | psmUpsmU |
| 301 | 1203 | 317 | 337 | fUpsmCpsfCmAfCmCfAmGfCmUfCmAfUmCfU | 1785 | vmUpsfGpsmCfCmGfGmAfGmAfUmGfAmGfCmUfGmGfUmGfGm |
| | | | | mCfCmGfGmCpsfA | | ApsmUpsmU |
| 302 | 1204 | 319 | 339 | fCpsmApsfCmCfAmGfCmUfCmAfUmCfUmCfC | 1786 | vmUpsfUpsmUfGmCfCmGfGmAfGmAfUmGfAmGfCmUfGmGfUm |
| | | | | mGfGmCfAmApsfA | | GpsmUpsmU |
| 303 | 1205 | 351 | 371 | fUpsmCpsfUmUfAmCfCmAfGmAfGmUfGmUf | 1787 | vmCpsfCpsmAfUmCfAmGfAmCfAmCfUmCfUmGfGmUfAmAfGmA |
| | | | | CmUfGmAfUmGpsfG | | psmUpsmU |
| 304 | 1206 | 352 | 372 | fCpsmUpsfUmAfCmCfAmGfAmGfUmGfUmCf | 1788 | vmCpsfCpsmCfAmUfCmAfGmAfCmAfCmUfCmUfGmGfUmAfAmG |
| | | | | UmGfAmUfGmGpsfG | | psmUpsmU |
| 305 | 1207 | 353 | 373 | fUpsmUpsfAmCfCmAfGmAfGmUfGmUfCmUf | 1789 | vmCpsfCpsmCfCmAfUmCfAmGfAmCfAmCfUmCfUmGfGmUfAmA |
| | | | | GmAfUmGfGmGpsfG | | psmUpsmU |
| 306 | 1208 | 354 | 374 | fUpsmApsfCmCfAmGfAmGfUmGfUmCfUmGf | 1790 | vmUpsfCpsmCfCmCfAmUfCmAfGmAfCmAfCmUfCmUfGmGfUmA |
| | | | | AmUfGmGfGmGpsfA | | psmUpsmU |
| 307 | 1209 | 357 | 377 | fCpsmApsfGmAfGmUfGmUfCmUfGmAfUmGf | 1791 | vmUpsfUpsmUfUmCfCmCfCmAfUmCfAmGfAmCfAmCfUmCfUmG |
| | | | | GmGfGmAfAmApsfA | | psmUpsmU |
| 308 | 1210 | 358 | 378 | fApsmGpsfAmGfUmGfUmCfUmGfAmUfGmGf | 1792 | vmGpsfUpsmUfUmUfCmCfCmCfAmUfCmAfGmAfCmAfCmUfCmU |
| | | | | GmGfAmAfAmApsfC | | psmUpsmU |
| 309 | 1211 | 359 | 379 | fGpsmApsfGmUfGmUfCmUfGmAfUmGfGmGf | 1793 | vmCpsfGpsmUfUmUfUmCfCmCfCmAfUmCfAmGfAmCfAmCfUmC |
| | | | | GmAfAmAfAmCpsfG | | psmUpsmU |
| 310 | 1212 | 360 | 380 | fApsmGpsfUmGfUmCfUmGfAmUfGmGfGmGf | 1794 | vmApsfCpsmGfUmUfUmUfCmCfCmCfAmUfCmAfGmAfCmAfCmU |
| | | | | AmAfAmAfCmGpsfU | | psmUpsmU |
| 311 | 1213 | 361 | 381 | fGpsmUpsfGmUfCmUfGmAfUmGfGmGfGmAf | 1795 | vmApsfApsmCfGmUfUmUfUmCfCmCfCmAfUmCfAmGfAmCfAmC |
| | | | | AmAfAmCfGmUpsfU | | psmUpsmU |
| 312 | 1214 | 362 | 382 | fUpsmGpsfUmCfUmGfAmUfGmGfGmGfAmAf | 1796 | vmGpsfApsmAfCmGfUmUfUmUfCmCfCmCfAmUfCmAfGmAfCmA |
| | | | | AmAfCmGfUmUpsfC | | psmUpsmU |
| 313 | 1215 | 363 | 383 | fGpsmUpsfCmUfGmAfUmGfGmGfGmAfAmAf | 1797 | vmApsfGpsmAfAmCfGmUfUmUfUmCfCmCfCmAfUmCfAmGfAmC |
| | | | | AmCfGmUfUmCpsfU | | psmUpsmU |
| 314 | 1216 | 364 | 384 | fUpsmCpsfUmGfAmUfGmGfGmGfAmAfAmAf | 1798 | vmCpsfApsmGfAmAfCmGfUmUfUmUfCmCfCmCfAmUfCmAfGmA |
| | | | | CmGfUmUfCmUpsfG | | psmUpsmU |
| 315 | 1217 | 365 | 385 | fCpsmUpsfGmAfUmGfGmGfGmAfAmAfAmCf | 1799 | vmCpsfCpsmAfGmAfAmCfGmUfUmUfUmCfCmCfCmAfUmCfAmG |
| | | | | GmUfUmCfUmGpsfG | | psmUpsmU |
| 316 | 1218 | 366 | 386 | fUpsmGpsfAmUfGmGfGmGfAmAfAmAfCmGf | 1800 | vmApsfCpsmCfAmGfAmAfCmGfUmUfUmUfCmCfCmCfAmUfCmA |
| | | | | UmUfCmUfGmGpsfU | | psmUpsmU |
| 317 | 1219 | 367 | 387 | fGpsmApsfUmGfGmGfGmAfAmAfAmCfGmUf | 1801 | vmCpsfApsmCfCmAfGmAfAmCfGmUfUmUfUmCfCmCfCmAfUmCp |
| | | | | UmCfUmGfGmUpsfG | | smUpsmU |
| 318 | 1220 | 369 | 389 | fUpsmGpsfGmGfGmAfAmAfAmCfGmUfUmCf | 1802 | vmGpsfApsmCfAmCfCmAfGmAfAmCfGmUfUmUfUmCfCmCfCmA |
| | | | | UmGfGmUfGmUpsfC | | psmUpsmU |
| 319 | 1221 | 371 | 391 | fGpsmGpsfGmAfAmAfAmCfGmUfUmCfUmGf | 1803 | vmCpsfApsmGfAmCfAmCfCmAfGmAfAmCfGmUfUmUfUmCfCmC |
| | | | | GmUfGmUfCmUpsfG | | psmUpsmU |
| 320 | 1222 | 372 | 392 | fGpsmGpsfAmAfAmAfCmGfUmUfCmUfGmGf | 1804 | vmUpsfCpsmAfGmAfCmAfCmCfAmGfAmAfCmGfUmUfUmUfCmC |
| | | | | UmGfUmCfUmGpsfA | | psmUpsmU |
| 321 | 1223 | 375 | 395 | fApsmApsfAmCfGmUfUmCfUmGfGmUfGmUf | 1805 | vmApsfApsmGfUmCfAmGfAmCfAmCfCmAfGmAfAmCfGmUfUmU |
| | | | | CmUfGmAfCmUpsfU | | psmUpsmU |
| 322 | 1224 | 376 | 396 | fApsmApsfCmGfUmUfCmUfGmGfUmGfUmCf | 1806 | vmApsfApsmAfGmUfCmAfGmAfCmAfCmCfAmGfAmAfCmGfUmU |
| | | | | UmGfAmCfUmUpsfU | | psmUpsmU |
| 323 | 1225 | 377 | 397 | fApsmCpsfGmUfUmCfUmGfGmUfGmUfCmUf | 1807 | vmGpsfApsmAfAmGfUmCfAmGfAmCfAmCfCmAfGmAfAmCfGmU |
| | | | | GmAfCmUfUmUpsfC | | psmUpsmU |
| 324 | 1226 | 378 | 398 | fCpsmGpsfUmUfCmUfGmGfUmGfUmCfUmGf | 1808 | vmCpsfGpsmAfAmAfGmUfCmAfGmAfCmAfCmCfAmGfAmAfCmG |
| | | | | AmCfUmUfUmCpsfG | | psmUpsmU |
| 325 | 1227 | 382 | 402 | fCpsmUpsfGmGfUmGfUmCfUmGfAmCfUmUf | 1809 | vmGpsfGpsmAfCmCfGmAfAmAfGmUfCmAfGmAfCmAfCmCfAmG |
| | | | | UmCfGmGfUmCpsfC | | psmUpsmU |
| 326 | 1228 | 383 | 403 | fUpsmGpsfGmUfGmUfCmUfGmAfCmUfUmUf | 1810 | vmUpsfGpsmGfAmCfCmGfAmAfAmGfUmCfAmGfAmCfAmCfCmA |
| | | | | CmGfGmUfCmCpsfA | | psmUpsmU |
| 327 | 1229 | 384 | 404 | fGpsmGpsfUmGfUmCfUmGfAmCfUmUfUmCf | 1811 | vmUpsfUpsmGfGmAfCmCfGmAfAmAfGmUfCmAfGmAfCmAfCmC |
| | | | | GmGfUmCfCmApsfA | | psmUpsmU |
| 328 | 1230 | 385 | 405 | fGpsmUpsfGmUfCmUfGmAfCmUfUmUfCmGf | 1812 | vmUpsfUpsmUfGmGfAmCfCmGfAmAfAmGfUmCfAmGfAmCfAmC |
| | | | | GmUfCmCfAmApsfA | | psmUpsmU |
| 329 | 1231 | 387 | 407 | fGpsmUpsfCmUfGmAfCmUfUmUfCmGfGmUf | 1813 | vmUpsfCpsmUfUmUfGmGfAmCfCmGfAmAfAmGfUmCfAmGfAmC |
| | | | | CmCfAmAfAmGpsfA | | psmUpsmU |
| 330 | 1232 | 388 | 408 | fUpsmCpsfUmGfAmCfUmUfUmCfGmGfUmCf | 1814 | vmGpsfUpsmCfUmUfUmGfGmAfCmCfGmAfAmAfGmUfCmAfGmA |
| | | | | CmAfAmAfGmApsfC | | psmUpsmU |
| 331 | 1233 | 398 | 418 | fGpsmGpsfUmCfCmAfAmAfGmAfCmGfAmAfG | 1815 | vmCpsfCpsmAfCmGfAmCfUmUfCmGfUmCfUmUfUmGfGmAfCmC |
| | | | | mUfCmGfUmGpsfG | | psmUpsmU |
| 332 | 1234 | 399 | 419 | fGpsmUpsfCmCfAmAfAmGfAmCfGmAfAmGfU | 1816 | vmUpsfCpsmCfAmCfGmAfCmUfUmCfGmUfCmUfUmUfGmGfAmC |
| | | | | mCfGmUfGmGpsfA | | psmUpsmU |
| 333 | 1235 | 400 | 420 | fUpsmCpsfCmAfAmAfGmAfCmGfAmAfGmUfC | 1817 | vmApsfUpsmCfCmAfCmGfAmCfUmUfCmGfUmCfUmUfUmGfGmA |
| | | | | mGfUmGfGmApsfU | | psmUpsmU |
| 334 | 1236 | 402 | 422 | fCpsmApsfAmAfGmAfCmGfAmAfGmUfCmGfU | 1818 | vmGpsfCpsmAfUmCfCmAfCmGfAmCfUmUfCmGfUmCfUmUfUmG |
| | | | | mGfGmAfUmGpsfC | | psmUpsmU |
| 335 | 1237 | 403 | 423 | fApsmApsfAmGfAmCfGmAfAmGfUmCfGmUf | 1819 | vmGpsfGpsmCfAmUfCmCfAmCfGmAfCmUfUmCfGmUfCmUfUmU |
| | | | | GmGfAmUfGmCpsfC | | psmUpsmU |
| 336 | 1238 | 404 | 424 | fApsmApsfGmAfCmGfAmAfGmUfCmGfUmGf | 1820 | vmApsfGpsmGfCmAfUmCfCmAfCmGfAmCfUmUfCmGfUmCfUmU |
| | | | | GmAfUmGfCmCpsfU | | psmUpsmU |
| 337 | 1239 | 405 | 425 | fApsmGpsfAmCfGmAfAmGfUmCfGmUfGmGf | 1821 | vmApsfApsmGfGmCfAmUfCmCfAmCfGmAfCmUfUmCfGmUfCmU |
| | | | | AmUfGmCfCmUpsfU | | psmUpsmU |
| 338 | 1240 | 407 | 427 | fApsmCpsfGmAfAmGfUmCfGmUfGmGfAmUf | 1822 | vmCpsfCpsmAfAmGfGmCfAmUfCmCfAmCfGmAfCmUfUmCfGmU |
| | | | | GmCfCmUfUmGpsfG | | psmUpsmU |
| 339 | 1241 | 408 | 428 | fCpsmGpsfAmAfGmUfCmGfUmGfGmAfUmGf | 1823 | vmApsfCpsmCfAmAfGmGfCmAfUmCfCmAfCmGfAmCfUmUfCmG |
| | | | | CmCfUmUfGmGpsfU | | psmUpsmU |
| 340 | 1242 | 409 | 429 | fGpsmApsfAmGfUmCfGmUfGmGfAmUfGmCf | 1824 | vmUpsfApsmCfCmAfAmGfGmCfAmUfCmCfAmCfGmAfCmUfUmC |
| | | | | CmUfUmGfGmUpsfA | | psmUpsmU |
| 341 | 1243 | 410 | 430 | fApsmApsfGmUfCmGfUmGfGmAfUmGfCmCf | 1825 | vmApsfUpsmAfCmCfAmAfGmGfCmAfUmCfCmAfCmGfAmCfUmU |
| | | | | UmUfGmGfUmApsfU | | psmUpsmU |
| 342 | 1244 | 412 | 432 | fGpsmUpsfCmGfUmGfGmAfUmGfCmCfUmUf | 1826 | vmApsfCpsmAfUmAfCmCfAmAfGmGfCmAfUmCfCmAfCmGfAmCp |
| | | | | GmGfUmAfUmGpsfU | | smUpsmU |
| 343 | 1245 | 413 | 433 | fUpsmCpsfGmUfGmGfAmUfGmCfCmUfUmGf | 1827 | vmApsfApsmCfAmUfAmCfCmAfAmGfGmCfAmUfCmCfAmCfGmAp |
| | | | | GmUfAmUfGmUpsfU | | smUpsmU |
| 344 | 1246 | 415 | 435 | fGpsmUpsfGmGfAmUfGmCfCmUfUmGfGmUf | 1828 | vmGpsfGpsmAfAmCfAmUfAmCfCmAfAmGfGmCfAmUfCmCfAmCp |
| | | | | AmUfGmUfUmCpsfC | | smUpsmU |
| 345 | 1247 | 416 | 436 | fUpsmGpsfGmAfUmGfCmCfUmUfGmGfUmAf | 1829 | vmApsfGpsmGfAmAfCmAfUmAfCmCfAmAfGmGfCmAfUmCfCmA |
| | | | | UmGfUmUfCmCpsfU | | psmUpsmU |
| 346 | 1248 | 417 | 437 | fGpsmGpsfAmUfGmCfCmUfUmGfGmUfAmUf | 1830 | vmCpsfApsmGfGmAfAmCfAmUfAmCfCmAfAmGfGmCfAmUfCmCp |
| | | | | GmUfUmCfCmUpsfG | | smUpsmU |
| 347 | 1249 | 419 | 439 | fApsmUpsfGmCfCmUfUmGfGmUfAmUfGmUf | 1831 | vmApsfGpsmCfAmGfGmAfAmCfAmUfAmCfCmAfAmGfGmCfAmU |
| | | | | UmCfCmUfGmCpsfU | | psmUpsmU |
| 348 | 1250 | 421 | 441 | fGpsmCpsfCmUfUmGfGmUfAmUfGmUfUmCf | 1832 | vmGpsfApsmAfGmCfAmGfGmAfAmCfAmUfAmCfCmAfAmGfGmC |
| | | | | CmUfGmCfUmUpsfC | | psmUpsmU |
| 349 | 1251 | 430 | 450 | fUpsmGpsfUmUfCmCfUmGfCmUfUmCfAmUf | 1833 | vmGpsfApsmAfGmGfGmCfAmUfGmAfAmGfCmAfGmGfAmAfCmA |
| | | | | GmCfCmCfUmUpsfC | | psmUpsmU |
| 350 | 1252 | 433 | 453 | fUpsmCpsfCmUfGmCfUmUfCmAfUmGfCmCfC | 1834 | vmGpsfUpsmAfGmAfAmGfGmGfCmAfUmGfAmAfGmCfAmGfGmA |
| | | | | mUfUmCfUmApsfC | | psmUpsmU |
| 351 | 1253 | 454 | 474 | fApsmGpsfUmGfGmCfCmUfUmAfUmCfCmCfU | 1835 | vmGpsfGpsmAfAmGfGmAfGmGfGmAfUmAfAmGfGmCfCmAfCmU |
| | | | | mCfCmUfUmCpsfC | | psmUpsmU |
| 352 | 1254 | 457 | 477 | fGpsmGpsfCmCfUmUfAmUfCmCfCmUfCmCfU | 1836 | vmGpsfApsmAfGmGfAmAfGmGfAmGfGmGfAmUfAmAfGmGfCmC |
| | | | | mUfCmCfUmUpsfC | | psmUpsmU |
| 353 | 1255 | 459 | 479 | fCpsmCpsfUmUfAmUfCmCfCmUfCmCfUmUfC | 1837 | vmCpsfUpsmGfAmAfGmGfAmAfGmGfAmGfGmGfAmUfAmAfGm |
| | | | | mCfUmUfCmApsfG | | GpsmUpsmU |
| 354 | 1256 | 460 | 480 | fCpsmUpsfUmAfUmCfCmCfUmCfCmUfUmCfC | 1838 | vmUpsfCpsmUfGmAfAmGfGmAfAmGfGmAfGmGfGmAfUmAfAm |
| | | | | mUfUmCfAmGpsfA | | GpsmUpsmU |
| 355 | 1257 | 461 | 481 | fUpsmUpsfAmUfCmCfCmUfCmCfUmUfCmCfU | 1839 | vmCpsfUpsmCfUmGfAmAfGmGfAmAfGmGfAmGfGmGfAmUfAmA |
| | | | | mUfCmAfGmApsfG | | psmUpsmU |
| 356 | 1258 | 465 | 485 | fCpsmCpsfCmUfCmCfUmUfCmCfUmUfCmAfG | 1840 | vmApsfCpsmGfCmCfUmCfUmGfAmAfGmGfAmAfGmGfAmGfGmG |
| | | | | mAfGmGfCmGpsfU | | psmUpsmU |
| 357 | 1259 | 466 | 486 | fCpsmCpsfUmCfCmUfUmCfCmUfUmCfAmGfA | 1841 | vmCpsfApsmCfGmCfCmUfCmUfGmAfAmGfGmAfAmGfGmAfGmG |
| | | | | mGfGmCfGmUpsfG | | psmUpsmU |
| 358 | 1260 | 467 | 487 | fCpsmUpsfCmCfUmUfCmCfUmUfCmAfGmAfG | 1842 | vmGpsfCpsmAfCmGfCmCfUmCfUmGfAmAfGmGfAmAfGmGfAmG |
| | | | | mGfCmGfUmGpsfC | | psmUpsmU |
| 359 | 1261 | 469 | 489 | fCpsmCpsfUmUfCmCfUmUfCmAfGmAfGmGfC | 1843 | vmUpsfCpsmGfCmAfCmGfCmCfUmCfUmGfAmAfGmGfAmAfGmG |
| | | | | mGfUmGfCmGpsfA | | psmUpsmU |
| 360 | 1262 | 470 | 490 | fCpsmUpsfUmCfCmUfUmCfAmGfAmGfGmCfG | 1844 | vmApsfUpsmCfGmCfAmCfGmCfCmUfCmUfGmAfAmGfGmAfAmG |
| | | | | mUfGmCfGmApsfU | | psmUpsmU |
| 361 | 1263 | 471 | 491 | fUpsmUpsfCmCfUmUfCmAfGmAfGmGfCmGf | 1845 | vmUpsfApsmUfCmGfCmAfCmGfCmCfUmCfUmGfAmAfGmGfAmA |
| | | | | UmGfCmGfAmUpsfA | | psmUpsmU |
| 362 | 1264 | 489 | 509 | fApsmUpsfAmUfGmUfGmGfAmUfGmGfAmGf | 1846 | vmCpsfUpsmCfAmCfUmCfCmUfCmCfAmUfCmCfAmCfAmUfAmUp |
| | | | | GmAfGmUfGmApsfG | | smUpsmU |
| 363 | 1265 | 499 | 519 | fGpsmGpsfAmGfGmAfGmUfGmAfGmUfGmAf | 1847 | vmUpsfApsmCfGmUfUmGfUmCfAmCfUmCfAmCfUmCfCmUfCmC |
| | | | | CmAfAmCfGmUpsfA | | psmUpsmU |
| 364 | 1266 | 501 | 521 | fApsmGpsfGmAfGmUfGmAfGmUfGmAfCmAf | 1848 | vmGpsfGpsmUfAmCfGmUfUmGfUmCfAmCfUmCfAmCfUmCfCmU |
| | | | | AmCfGmUfAmCpsfC | | psmUpsmU |
| 365 | 1267 | 502 | 522 | fGpsmGpsfAmGfUmGfAmGfUmGfAmCfAmAf | 1849 | vmGpsfGpsmGfUmAfCmGfUmUfGmUfCmAfCmUfCmAfCmUfCmC |
| | | | | CmGfUmAfCmCpsfC | | psmUpsmU |
| 366 | 1268 | 505 | 525 | fGpsmUpsfGmAfGmUfGmAfCmAfAmCfGmUf | 1850 | vmGpsfApsmAfGmGfGmUfAmCfGmUfUmGfUmCfAmCfUmCfAmC |
| | | | | AmCfCmCfUmUpsfC | | psmUpsmU |
| 367 | 1269 | 528 | 548 | fUpsmGpsfAmUfGmCfCmAfAmAfAmCfAmAfC | 1851 | vmGpsfUpsmGfAmUfGmGfUmUfGmUfUmUfUmGfGmCfAmUfCm |
| | | | | mCfAmUfCmApsfC | | ApsmUpsmU |
| 368 | 1270 | 529 | 549 | fGpsmApsfUmGfCmCfAmAfAmAfCmAfAmCfC | 1852 | vmGpsfGpsmUfGmAfUmGfGmUfUmGfUmUfUmUfGmGfCmAfUm |
| | | | | mAfUmCfAmCpsfC | | CpsmUpsmU |
| 369 | 1271 | 530 | 550 | fApsmUpsfGmCfCmAfAmAfAmCfAmAfCmCfA | 1853 | vmCpsfGpsmGfUmGfAmUfGmGfUmUfGmUfUmUfUmGfGmCfAm |
| | | | | mUfCmAfCmCpsfG | | UpsmUpsmU |
| 370 | 1272 | 533 | 553 | fCpsmCpsfAmAfAmAfCmAfAmCfCmAfUmCfA | 1854 | vmApsfCpsmAfCmGfGmUfGmAfUmGfGmUfUmGfUmUfUmUfGm |
| | | | | mCfCmGfUmGpsfU | | GpsmUpsmU |
| 371 | 1273 | 534 | 554 | fCpsmApsfAmAfAmCfAmAfCmCfAmUfCmAfC | 1855 | vmGpsfApsmCfAmCfGmGfUmGfAmUfGmGfUmUfGmUfUmUfUm |
| | | | | mCfGmUfGmUpsfC | | GpsmUpsmU |
| 372 | 1274 | 536 | 556 | fApsmApsfAmCfAmAfCmCfAmUfCmAfCmCfG | 1856 | vmGpsfGpsmGfAmCfAmCfGmGfUmGfAmUfGmGfUmUfGmUfUm |
| | | | | mUfGmUfCmCpsfC | | UpsmUpsmU |
| 373 | 1275 | 537 | 557 | fApsmApsfCmAfAmCfCmAfUmCfAmCfCmGfU | 1857 | vmGpsfGpsmGfGmAfCmAfCmGfGmUfGmAfUmGfGmUfUmGfUm |
| | | | | mGfUmCfCmCpsfC | | UpsmUpsmU |
| 374 | 1276 | 538 | 558 | fApsmCpsfAmAfCmCfAmUfCmAfCmCfGmUfG | 1858 | vmGpsfGpsmGfGmGfAmCfAmCfGmGfUmGfAmUfGmGfUmUfGm |
| | | | | mUfCmCfCmCpsfC | | UpsmUpsmU |
| 375 | 1277 | 539 | 559 | fCpsmApsfAmCfCmAfUmCfAmCfCmGfUmGfU | 1859 | vmApsfGpsmGfGmGfGmAfCmAfCmGfGmUfGmAfUmGfGmUfUm |
| | | | | mCfCmCfCmCpsfU | | GpsmUpsmU |
| 376 | 1278 | 544 | 564 | fApsmUpsfCmAfCmCfGmUfGmUfCmCfCmCfC | 1860 | vmApsfUpsmAfGmAfAmGfGmGfGmGfAmCfAmCfGmGfUmGfAm |
| | | | | mUfUmCfUmApsfU | | UpsmUpsmU |
| 377 | 1279 | 545 | 565 | fUpsmCpsfAmCfCmGfUmGfUmCfCmCfCmCfU | 1861 | vmCpsfApsmUfAmGfAmAfGmGfGmGfGmAfCmAfCmGfGmUfGmA |
| | | | | mUfCmUfAmUpsfG | | psmUpsmU |
| 378 | 1280 | 546 | 566 | fCpsmApsfCmCfGmUfGmUfCmCfCmCfCmUfU | 1862 | vmCpsfCpsmAfUmAfGmAfAmGfGmGfGmGfAmCfAmCfGmGfUmG |
| | | | | mCfUmAfUmGpsfG | | psmUpsmU |
| 379 | 1281 | 547 | 567 | fApsmCpsfCmGfUmGfUmCfCmCfCmCfUmUfC | 1863 | vmCpsfCpsmCfAmUfAmGfAmAfGmGfGmGfGmAfCmAfCmGfGmU |
| | | | | mUfAmUfGmGpsfG | | psmUpsmU |
| 380 | 1282 | 550 | 570 | fGpsmUpsfGmUfCmCfCmCfCmUfUmCfUmAfU | 1864 | vmCpsfUpsmCfCmCfCmAfUmAfGmAfAmGfGmGfGmGfAmCfAmC |
| | | | | mGfGmGfGmApsfG | | psmUpsmU |
| 381 | 1283 | 551 | 571 | fUpsmGpsfUmCfCmCfCmCfUmUfCmUfAmUfG | 1865 | vmApsfCpsmUfCmCfCmCfAmUfAmGfAmAfGmGfGmGfGmAfCmA |
| | | | | mGfGmGfAmGpsfU | | psmUpsmU |
| 382 | 1284 | 552 | 572 | fGpsmUpsfCmCfCmCfCmUfUmCfUmAfUmGfG | 1866 | vmUpsfApsmCfUmCfCmCfCmAfUmAfGmAfAmGfGmGfGmGfAmC |
| | | | | mGfGmAfGmUpsfA | | psmUpsmU |
| 383 | 1285 | 553 | 573 | fUpsmCpsfCmCfCmCfUmUfCmUfAmUfGmGfG | 1867 | vmGpsfUpsmAfCmUfCmCfCmCfAmUfAmGfAmAfGmGfGmGfGmA |
| | | | | mGfAmGfUmApsfC | | psmUpsmU |
| 384 | 1286 | 556 | 576 | fCpsmCpsfCmUfUmCfUmAfUmGfGmGfGmAf | 1868 | vmGpsfUpsmCfGmUfAmCfUmCfCmCfCmAfUmAfGmAfAmGfGmG |
| | | | | GmUfAmCfGmApsfC | | psmUpsmU |
| 385 | 1287 | 557 | 577 | fCpsmCpsfUmUfCmUfAmUfGmGfGmGfAmGf | 1869 | vmUpsfGpsmUfCmGfUmAfCmUfCmCfCmCfAmUfAmGfAmAfGmG |
| | | | | UmAfCmGfAmCpsfA | | psmUpsmU |
| 386 | 1288 | 559 | 579 | fUpsmUpsfCmUfAmUfGmGfGmGfAmGfUmAf | 1870 | vmGpsfApsmUfGmUfCmGfUmAfCmUfCmCfCmCfAmUfAmGfAmA |
| | | | | CmGfAmCfAmUpsfC | | psmUpsmU |
| 387 | 1289 | 560 | 580 | fUpsmCpsfUmAfUmGfGmGfGmAfGmUfAmCf | 1871 | vmApsfGpsmAfUmGfUmCfGmUfAmCfUmCfCmCfCmAfUmAfGmA |
| | | | | GmAfCmAfUmCpsfU | | psmUpsmU |
| 388 | 1290 | 561 | 581 | fCpsmUpsfAmUfGmGfGmGfAmGfUmAfCmGf | 1872 | vmCpsfApsmGfAmUfGmUfCmGfUmAfCmUfCmCfCmCfAmUfAmG |
| | | | | AmCfAmUfCmUpsfG | | psmUpsmU |
| 389 | 1291 | 562 | 582 | fUpsmApsfUmGfGmGfGmAfGmUfAmCfGmAf | 1873 | vmGpsfCpsmAfGmAfUmGfUmCfGmUfAmCfUmCfCmCfCmAfUmA |
| | | | | CmAfUmCfUmGpsfC | | psmUpsmU |
| 390 | 1292 | 572 | 592 | fApsmCpsfGmAfCmAfUmCfUmGfCmCfCmUfA | 1874 | vmUpsfGpsmAfCmUfUmUfAmGfGmGfCmAfGmAfUmGfUmCfGm |
| | | | | mAfAmGfUmCpsfA | | UpsmUpsmU |
| 391 | 1293 | 573 | 593 | fCpsmGpsfAmCfAmUfCmUfGmCfCmCfUmAfA | 1875 | vmUpsfUpsmGfAmCfUmUfUmAfGmGfGmCfAmGfAmUfGmUfCm |
| | | | | mAfGmUfCmApsfA | | GpsmUpsmU |
| 392 | 1294 | 574 | 594 | fGpsmApsfCmAfUmCfUmGfCmCfCmUfAmAfA | 1876 | vmCpsfUpsmUfGmAfCmUfUmUfAmGfGmGfCmAfGmAfUmGfUm |
| | | | | mGfUmCfAmApsfG | | CpsmUpsmU |
| 393 | 1295 | 575 | 595 | fApsmCpsfAmUfCmUfGmCfCmCfUmAfAmAfG | 1877 | vmApsfCpsmUfUmGfAmCfUmUfUmAfGmGfGmCfAmGfAmUfGm |
| | | | | mUfCmAfAmGpsfU | | UpsmUpsmU |
| 394 | 1296 | 576 | 596 | fCpsmApsfUmCfUmGfCmCfCmUfAmAfAmGfU | 1878 | vmGpsfApsmCfUmUfGmAfCmUfUmUfAmGfGmGfCmAfGmAfUm |
| | | | | mCfAmAfGmUpsfC | | GpsmUpsmU |
| 395 | 1297 | 577 | 597 | fApsmUpsfCmUfGmCfCmCfUmAfAmAfGmUfC | 1879 | vmGpsfGpsmAfCmUfUmGfAmCfUmUfUmAfGmGfGmCfAmGfAm |
| | | | | mAfAmGfUmCpsfC | | UpsmUpsmU |
| 396 | 1298 | 582 | 602 | fCpsmCpsfCmUfAmAfAmGfUmCfAmAfGmUfC | 1880 | vmUpsfUpsmCfGmUfGmGfAmCfUmUfGmAfCmUfUmUfAmGfGm |
| | | | | mCfAmCfGmApsfA | | GpsmUpsmU |
| 397 | 1299 | 583 | 603 | fCpsmCpsfUmAfAmAfGmUfCmAfAmGfUmCfC | 1881 | vmGpsfUpsmUfCmGfUmGfGmAfCmUfUmGfAmCfUmUfUmAfGm |
| | | | | mAfCmGfAmApsfC | | GpsmUpsmU |
| 398 | 1300 | 585 | 605 | fUpsmApsfAmAfGmUfCmAfAmGfUmCfCmAfC | 1882 | vmApsfApsmGfUmUfCmGfUmGfGmAfCmUfUmGfAmCfUmUfUm |
| | | | | mGfAmAfCmUpsfU | | ApsmUpsmU |
| 399 | 1301 | 586 | 606 | fApsmApsfAmGfUmCfAmAfGmUfCmCfAmCfG | 1883 | vmApsfApsmAfGmUfUmCfGmUfGmGfAmCfUmUfGmAfCmUfUm |
| | | | | mAfAmCfUmUpsfU | | UpsmUpsmU |
| 400 | 1302 | 587 | 607 | fApsmApsfGmUfCmAfAmGfUmCfCmAfCmGfA | 1884 | vmGpsfApsmAfAmGfUmUfCmGfUmGfGmAfCmUfUmGfAmCfUm |
| | | | | mAfCmUfUmUpsfC | | UpsmUpsmU |
| 401 | 1303 | 588 | 608 | fApsmGpsfUmCfAmAfGmUfCmCfAmCfGmAfA | 1885 | vmApsfGpsmAfAmAfGmUfUmCfGmUfGmGfAmCfUmUfGmAfCm |
| | | | | mCfUmUfUmCpsfU | | UpsmUpsmU |
| 402 | 1304 | 589 | 609 | fGpsmUpsfCmAfAmGfUmCfCmAfCmGfAmAfC | 1886 | vmApsfApsmGfAmAfAmGfUmUfCmGfUmGfGmAfCmUfUmGfAmC |
| | | | | mUfUmUfCmUpsfU | | psmUpsmU |
| 403 | 1305 | 590 | 610 | fUpsmCpsfAmAfGmUfCmCfAmCfGmAfAmCfU | 1887 | vmGpsfApsmAfGmAfAmAfGmUfUmCfGmUfGmGfAmCfUmUfGm |
| | | | | mUfUmCfUmUpsfC | | ApsmUpsmU |
| 404 | 1306 | 591 | 611 | fCpsmApsfAmGfUmCfCmAfCmGfAmAfCmUfU | 1888 | vmUpsfGpsmAfAmGfAmAfAmGfUmUfCmGfUmGfGmAfCmUfUm |
| | | | | mUfCmUfUmCpsfA | | GpsmUpsmU |
| 405 | 1307 | 592 | 612 | fApsmApsfGmUfCmCfAmCfGmAfAmCfUmUfU | 1889 | vmApsfUpsmGfAmAfGmAfAmAfGmUfUmCfGmUfGmGfAmCfUm |
| | | | | mCfUmUfCmApsfU | | UpsmUpsmU |
| 406 | 1308 | 593 | 613 | fApsmGpsfUmCfCmAfCmGfAmAfCmUfUmUfC | 1890 | vmCpsfApsmUfGmAfAmGfAmAfAmGfUmUfCmGfUmGfGmAfCmU |
| | | | | mUfUmCfAmUpsfG | | psmUpsmU |
| 407 | 1309 | 595 | 615 | fUpsmCpsfCmAfCmGfAmAfCmUfUmUfCmUfU | 1891 | vmCpsfApsmCfAmUfGmAfAmGfAmAfAmGfUmUfCmGfUmGfGmA |
| | | | | mCfAmUfGmUpsfG | | psmUpsmU |
| 408 | 1310 | 618 | 638 | fCpsmApsfUmCfAmCfCmAfAmGfCmUfCmAfG | 1892 | vmCpsfGpsmUfAmGfAmCfUmGfAmGfCmUfUmGfGmUfGmAfUm |
| | | | | mUfCmUfAmCpsfG | | GpsmUpsmU |
| 409 | 1311 | 619 | 639 | fApsmUpsfCmAfCmCfAmAfGmCfUmCfAmGfU | 1893 | vmGpsfCpsmGfUmAfGmAfCmUfGmAfGmCfUmUfGmGfUmGfAm |
| | | | | mCfUmAfCmGpsfC | | UpsmUpsmU |
| 410 | 1312 | 620 | 640 | fUpsmCpsfAmCfCmAfAmGfCmUfCmAfGmUfC | 1894 | vmGpsfGpsmCfGmUfAmGfAmCfUmGfAmGfCmUfUmGfGmUfGm |
| | | | | mUfAmCfGmCpsfC | | ApsmUpsmU |
| 411 | 1313 | 621 | 641 | fCpsmApsfCmCfAmAfGmCfUmCfAmGfUmCfU | 1895 | vmApsfGpsmGfCmGfUmAfGmAfCmUfGmAfGmCfUmUfGmGfUm |
| | | | | mAfCmGfCmCpsfU | | GpsmUpsmU |
| 412 | 1314 | 622 | 642 | fApsmCpsfCmAfAmGfCmUfCmAfGmUfCmUfA | 1896 | vmGpsfApsmGfGmCfGmUfAmGfAmCfUmGfAmGfCmUfUmGfGm |
| | | | | mCfGmCfCmUpsfC | | UpsmUpsmU |
| 413 | 1315 | 623 | 643 | fCpsmCpsfAmAfGmCfUmCfAmGfUmCfUmAfC | 1897 | vmApsfGpsmAfGmGfCmGfUmAfGmAfCmUfGmAfGmCfUmUfGm |
| | | | | mGfCmCfUmCpsfU | | GpsmUpsmU |
| 414 | 1316 | 624 | 644 | fCpsmApsfAmGfCmUfCmAfGmUfCmUfAmCfG | 1898 | vmCpsfApsmGfAmGfGmCfGmUfAmGfAmCfUmGfAmGfCmUfUmG |
| | | | | mCfCmUfCmUpsfG | | psmUpsmU |
| 415 | 1317 | 628 | 648 | fCpsmUpsfCmAfGmUfCmUfAmCfGmCfCmUfC | 1899 | vmUpsfGpsmUfGmCfAmGfAmGfGmCfGmUfAmGfAmCfUmGfAm |
| | | | | mUfGmCfAmCpsfA | | GpsmUpsmU |
| 416 | 1318 | 629 | 649 | fUpsmCpsfAmGfUmCfUmAfCmGfCmCfUmCfU | 1900 | vmCpsfUpsmGfUmGfCmAfGmAfGmGfCmGfUmAfGmAfCmUfGmA |
| | | | | mGfCmAfCmApsfG | | psmUpsmU |
| 417 | 1319 | 630 | 650 | fCpsmApsfGmUfCmUfAmCfGmCfCmUfCmUfG | 1901 | vmCpsfCpsmUfGmUfGmCfAmGfAmGfGmCfGmUfAmGfAmCfUmG |
| | | | | mCfAmCfAmGpsfG | | psmUpsmU |
| 418 | 1320 | 636 | 656 | fApsmCpsfGmCfCmUfCmUfGmCfAmCfAmGfG | 1902 | vmApsfGpsmGfUmUfCmCfCmUfGmUfGmCfAmGfAmGfGmCfGmU |
| | | | | mGfAmAfCmCpsfU | | psmUpsmU |
| 419 | 1321 | 637 | 657 | fCpsmGpsfCmCfUmCfUmGfCmAfCmAfGmGfG | 1903 | vmGpsfApsmGfGmUfUmCfCmCfUmGfUmGfCmAfGmAfGmGfCmG |
| | | | | mAfAmCfCmUpsfC | | psmUpsmU |
| 420 | 1322 | 638 | 658 | fGpsmCpsfCmUfCmUfGmCfAmCfAmGfGmGfA | 1904 | vmApsfGpsmAfGmGfUmUfCmCfCmUfGmUfGmCfAmGfAmGfGmC |
| | | | | mAfCmCfUmCpsfU | | psmUpsmU |
| 421 | 1323 | 640 | 660 | fCpsmUpsfCmUfGmCfAmCfAmGfGmGfAmAfC | 1905 | vmGpsfUpsmAfGmAfGmGfUmUfCmCfCmUfGmUfGmCfAmGfAm |
| | | | | mCfUmCfUmApsfC | | GpsmUpsmU |
| 422 | 1324 | 641 | 661 | fUpsmCpsfUmGfCmAfCmAfGmGfGmAfAmCfC | 1906 | vmGpsfGpsmUfAmGfAmGfGmUfUmCfCmCfUmGfUmGfCmAfGm |
| | | | | mUfCmUfAmCpsfC | | ApsmUpsmU |
| 423 | 1325 | 644 | 664 | fGpsmCpsfAmCfAmGfGmGfAmAfCmCfUmCfU | 1907 | vmGpsfApsmAfGmGfUmAfGmAfGmGfUmUfCmCfCmUfGmUfGm |
| | | | | mAfCmCfUmUpsfC | | CpsmUpsmU |
| 424 | 1326 | 645 | 665 | fCpsmApsfCmAfGmGfGmAfAmCfCmUfCmUfA | 1908 | vmApsfGpsmAfAmGfGmUfAmGfAmGfGmUfUmCfCmCfUmGfUm |
| | | | | mCfCmUfUmCpsfU | | GpsmUpsmU |
| 425 | 1327 | 694 | 714 | fApsmApsfGmGfUmGfCmUfGmGfGmAfGmAf | 1909 | vmGpsfCpsmAfUmAfUmCfUmCfUmCfCmCfAmGfCmAfCmCfUmU |
| | | | | GmAfUmAfUmGpsfC | | psmUpsmU |
| 426 | 1328 | 695 | 715 | fApsmGpsfGmUfGmCfUmGfGmGfAmGfAmGf | 1910 | vmGpsfGpsmCfAmUfAmUfCmUfCmUfCmCfCmAfGmCfAmCfCmU |
| | | | | AmUfAmUfGmCpsfC | | psmUpsmU |
| 427 | 1329 | 696 | 716 | fGpsmGpsfUmGfCmUfGmGfGmAfGmAfGmAf | 1911 | vmApsfGpsmGfCmAfUmAfUmCfUmCfUmCfCmCfAmGfCmAfCmCp |
| | | | | UmAfUmGfCmCpsfU | | smUpsmU |
| 428 | 1330 | 697 | 717 | fGpsmUpsfGmCfUmGfGmGfAmGfAmGfAmUf | 1912 | vmApsfApsmGfGmCfAmUfAmUfCmUfCmUfCmCfCmAfGmCfAmC |
| | | | | AmUfGmCfCmUpsfU | | psmUpsmU |
| 429 | 1331 | 735 | 755 | fApsmUpsfUmCfAmGfGmUfUmCfUmUfGmGf | 1913 | vmUpsfUpsmCfUmCfUmUfCmCfAmAfGmAfAmCfCmUfGmAfAmU |
| | | | | AmAfGmAfGmApsfA | | psmUpsmU |
| 430 | 1332 | 741 | 761 | fGpsmUpsfUmCfUmUfGmGfAmAfGmAfGmAf | 1914 | vmApsfUpsmGfCmCfCmUfUmCfUmCfUmUfCmCfAmAfGmAfAmC |
| | | | | AmGfGmGfCmApsfU | | psmUpsmU |
| 431 | 1333 | 742 | 762 | fUpsmUpsfCmUfUmGfGmAfAmGfAmGfAmAf | 1915 | vmGpsfApsmUfGmCfCmCfUmUfCmUfCmUfUmCfCmAfAmGfAmA |
| | | | | GmGfGmCfAmUpsfC | | psmUpsmU |
| 432 | 1334 | 743 | 763 | fUpsmCpsfUmUfGmGfAmAfGmAfGmAfAmGf | 1916 | vmApsfGpsmAfUmGfCmCfCmUfUmCfUmCfUmUfCmCfAmAfGmA |
| | | | | GmGfCmAfUmCpsfU | | psmUpsmU |
| 433 | 1335 | 744 | 764 | fCpsmUpsfUmGfGmAfAmGfAmGfAmAfGmGf | 1917 | vmCpsfApsmGfAmUfGmCfCmCfUmUfCmUfCmUfUmCfCmAfAmG |
| | | | | GmCfAmUfCmUpsfG | | psmUpsmU |
| 434 | 1336 | 745 | 765 | fUpsmUpsfGmGfAmAfGmAfGmAfAmGfGmGf | 1918 | vmGpsfCpsmAfGmAfUmGfCmCfCmUfUmCfUmCfUmUfCmCfAmA |
| | | | | CmAfUmCfUmGpsfC | | psmUpsmU |
| 435 | 1337 | 747 | 767 | fGpsmGpsfAmAfGmAfGmAfAmGfGmGfCmAf | 1919 | vmUpsfUpsmGfCmAfGmAfUmGfCmCfCmUfUmCfUmCfUmUfCmC |
| | | | | UmCfUmGfCmApsfA | | psmUpsmU |
| 436 | 1338 | 748 | 768 | fGpsmApsfAmGfAmGfAmAfGmGfGmCfAmUf | 1920 | vmGpsfUpsmUfGmCfAmGfAmUfGmCfCmCfUmUfCmUfCmUfUmC |
| | | | | CmUfGmCfAmApsfC | | psmUpsmU |
| 437 | 1339 | 749 | 769 | fApsmApsfGmAfGmAfAmGfGmGfCmAfUmCf | 1921 | vmUpsfGpsmUfUmGfCmAfGmAfUmGfCmCfCmUfUmCfUmCfUmU |
| | | | | UmGfCmAfAmCpsfA | | psmUpsmU |
| 438 | 1340 | 752 | 772 | fApsmGpsfAmAfGmGfGmCfAmUfCmUfGmCfA | 1922 | vmGpsfCpsmCfUmGfUmUfGmCfAmGfAmUfGmCfCmCfUmUfCmU |
| | | | | mAfCmAfGmGpsfC | | psmUpsmU |
| 439 | 1341 | 753 | 773 | fGpsmApsfAmGfGmGfCmAfUmCfUmGfCmAfA | 1923 | vmGpsfGpsmCfCmUfGmUfUmGfCmAfGmAfUmGfCmCfCmUfUmC |
| | | | | mCfAmGfGmCpsfC | | psmUpsmU |
| 440 | 1342 | 758 | 778 | fGpsmCpsfAmUfCmUfGmCfAmAfCmAfGmGfC | 1924 | vmGpsfCpsmUfGmGfGmGfCmCfUmGfUmUfGmCfAmGfAmUfGm |
| | | | | mCfCmCfAmGpsfC | | CpsmUpsmU |
| 441 | 1343 | 1026 | 1046 | fUpsmUpsfGmCfAmAfCmUfUmGfCmUfAmCfC | 1925 | vmCpsfUpsmAfAmUfGmGfGmUfAmGfCmAfAmGfUmUfGmCfAmA |
| | | | | mCfAmUfUmApsfG | | psmUpsmU |
| 442 | 1344 | 1039 | 1059 | fCpsmCpsfCmAfUmUfAmGfGmAfUmAfAmUfG | 1926 | vmApsfUpsmAfAmGfAmCfAmUfUmAfUmCfCmUfAmAfUmGfGmG |
| | | | | mUfCmUfUmApsfU | | psmUpsmU |
| 443 | 1345 | 1062 | 1082 | fApsmApsfUmGfCmUfGmCfCmCfUmGfUmAfC | 1927 | vmGpsfGpsmCfAmGfGmGfUmAfCmAfGmGfGmCfAmGfCmAfUmU |
| | | | | mCfCmUfGmCpsfC | | psmUpsmU |
| 444 | 1346 | 1067 | 1087 | fUpsmGpsfCmCfCmUfGmUfAmCfCmCfUmGfC | 1928 | vmCpsfCpsmAfCmAfGmGfCmAfGmGfGmUfAmCfAmGfGmGfCmA |
| | | | | mCfUmGfUmGpsfG | | psmUpsmU |
| 445 | 1347 | 1068 | 1088 | fGpsmCpsfCmCfUmGfUmAfCmCfCmUfGmCfC | 1929 | vmUpsfCpsmCfAmCfAmGfGmCfAmGfGmGfUmAfCmAfGmGfGmC |
| | | | | mUfGmUfGmGpsfA | | psmUpsmU |
| 446 | 1348 | 1077 | 1097 | fCpsmCpsfUmGfCmCfUmGfUmGfGmAfAmUfC | 1930 | vmApsfUpsmGfGmCfAmGfAmUfUmCfCmAfCmAfGmGfCmAfGmG |
| | | | | mUfGmCfCmApsfU | | psmUpsmU |
| 447 | 1349 | 1080 | 1100 | fGpsmCpsfCmUfGmUfGmGfAmAfUmCfUmGf | 1931 | vmGpsfCpsmAfAmUfGmGfCmAfGmAfUmUfCmCfAmCfAmGfGmC |
| | | | | CmCfAmUfUmGpsfC | | psmUpsmU |
| 448 | 1350 | 1159 | 1179 | fCpsmApsfGmUfGmGfGmUfGmAfCmCfUmCfA | 1932 | vmCpsfApsmCfCmUfGmUfGmAfGmGfUmCfAmCfCmCfAmCfUmG |
| | | | | mCfAmGfGmUpsfG | | psmUpsmU |
| 449 | 1351 | 1195 | 1215 | fApsmUpsfGmUfGmUfCmUfGmCfUmCfCmCfC | 1933 | vmGpsfGpsmAfGmGfCmGfGmGfGmAfGmCfAmGfAmCfAmCfAmU |
| | | | | mGfCmCfUmCpsfC | | psmUpsmU |
| 450 | 1352 | 1196 | 1216 | fUpsmGpsfUmGfUmCfUmGfCmUfCmCfCmCfG | 1934 | vmUpsfGpsmGfAmGfGmCfGmGfGmGfAmGfCmAfGmAfCmAfCmA |
| | | | | mCfCmUfCmCpsfA | | psmUpsmU |
| 451 | 1353 | 497 | 515 | mApsmUpsmGmGfAmGfGfAfGmUmGmAmG | 1935 | mUpsfUpsmGmUmCfAmCmUmCmAmCmUmCfCmUfCmCmAmUp |
| | | | | mUmGmAmCmAmApsmUpsmU | | smUpsmU |
| 452 | 1354 | 419 | 437 | mApsmUpsmGmCfCmUfUfGfGmUmAmUmG | 1936 | mCpsfApsmGmGmAfAmCmAmUmAmCmCmAfAmGfGmCmAmUp |
| | | | | mUmUmCmCmUmGpsmUpsmU | | smUpsmU |
| 453 | 1355 | 377 | 395 | mApsmCpsmGmUfUmCfUfGfGmUmGmUmC | 1937 | mApsfApsmGmUmCfAmGmAmCmAmCmCmAfGmAfAmCmGmUp |
| | | | | mUmGmAmCmUmUpsmUpsmU | | smUpsmU |
| 454 | 1356 | 386 | 404 | mUpsmGpsmUmCfUmGfAfCfUmUmUmCmG | 1938 | mUpsfUpsmGmGmAfCmCmGmAmAmAmGmUfCmAfGmAmCmA |
| | | | | mGmUmCmCmAmApsmUpsmU | | psmUpsmU |
| 455 | 1357 | 398 | 416 | mGpsmGpsmUmCfCmAfAfAfGmAmCmGmAm | 1939 | mApsfCpsmGmAmCfUmUmCmGmUmCmUmUfUmGfGmAmCmC |
| | | | | AmGmUmCmGmUpsmUpsmU | | psmUpsmU |
| 456 | 1358 | 502 | 520 | mGpsmGpsmAmGfUmGfAfGfUmGmAmCmA | 1940 | mGpsfUpsmAmCmGfUmUmGmUmCmAmCmUfCmAfCmUmCmCp |
| | | | | mAmCmGmUmAmCpsmUpsmU | | smUpsmU |
| 457 | 1359 | 532 | 550 | mGpsmCpsmCmAfAmAfAfCfAmAmCmCmAm | 1941 | mCpsfGpsmGmUmGfAmUmGmGmUmUmGmUfUmUfUmGmGm |
| | | | | UmCmAmCmCmGpsmUpsmU | | CpsmUpsmU |
| 458 | 1360 | 382 | 400 | mCpsmUpsmGmGfUmGfUfCfUmGmAmCmU | 1942 | mApsfCpsmCmGmAfAmAmGmUmCmAmGmAfCmAfCmCmAmGp |
| | | | | mUmUmCmGmGmUpsmUpsmU | | smUpsmU |
| 459 | 1361 | 378 | 396 | mCpsmGpsmUmUfCmUfGfGfUmGmUmCmU | 1943 | mApsfApsmAmGmUfCmAmGmAmCmAmCmCfAmGfAmAmCmGp |
| | | | | mGmAmCmUmUmUpsmUpsmU | | smUpsmU |
| 460 | 1362 | 575 | 593 | mApsmCpsmAmUfCmUfGfCfCmCmUmAmAm | 1944 | mUpsfUpsmGmAmCfUmUmUmAmGmGmGmCfAmGfAmUmGmU |
| | | | | AmGmUmCmAmApsmUpsmU | | psmUpsmU |
| 461 | 1363 | 372 | 390 | mGpsmGpsmAmAfAmAfCfGfUmUmCmUmG | 1945 | mApsfGpsmAmCmAfCmCmAmGmAmAmCmGfUmUfUmUmCmCp |
| | | | | mGmUmGmUmCmUpsmUpsmU | | smUpsmU |
| 462 | 1364 | 387 | 405 | mGpsmUpsmCmUfGmAfCfUfUmUmCmGmG | 1946 | mUpsfUpsmUmGmGfAmCmCmGmAmAmAmGfUmCfAmGmAmC |
| | | | | mUmCmCmAmAmApsmUpsmU | | psmUpsmU |
| 463 | 1365 | 375 | 393 | mApsmApsmAmCfGmUfUfCfUmGmGmUmG | 1947 | mGpsfUpsmCmAmGfAmCmAmCmCmAmGmAfAmCfGmUmUmUp |
| | | | | mUmCmUmGmAmCpsmUpsmU | | smUpsmU |
| 464 | 1366 | 1080 | 1098 | mGpsmCpsmCmUfGmUfGfGfAmAmUmCmU | 1948 | mApsfApsmUmGmGfCmAmGmAmUmUmCmCfAmCfAmGmGmCp |
| | | | | mGmCmCmAmUmUpsmUpsmU | | smUpsmU |
| 465 | 1367 | 1039 | 1057 | mCpsmCpsmCmAfUmUfAfGfGmAmUmAmAm | 1949 | mApsfApsmGmAmCfAmUmUmAmUmCmCmUfAmAfUmGmGmG |
| | | | | UmGmUmCmUmUpsmUpsmU | | psmUpsmU |
| 466 | 1368 | 415 | 433 | mGpsmUpsmGmGfAmUfGfCfCmUmUmGmG | 1950 | mApsfApsmCmAmUfAmCmCmAmAmGmGmCfAmUfCmCmAmCp |
| | | | | mUmAmUmGmUmUpsmUpsmU | | smUpsmU |
| 467 | 1369 | 402 | 420 | mCpsmApsmAmAfGmAfCfGfAmAmGmUmCm | 1951 | mApsfUpsmCmCmAfCmGmAmCmUmUmCmGfUmCfUmUmUmG |
| | | | | GmUmGmGmAmUpsmUpsmU | | psmUpsmU |
| 468 | 1370 | 416 | 434 | mUpsmGpsmGmAfUmGfCfCfUmUmGmGmU | 1952 | mGpsfApsmAmCmAfUmAmCmCmAmAmGmGfCmAfUmCmCmAp |
| | | | | mAmUmGmUmUmCpsmUpsmU | | smUpsmU |
| 469 | 1371 | 497 | 515 | mApsmUpsmGmGfAmGfGfAfGmUmGmAmG | 1953 | vmUpsfUpsmGmUmCfAmCmUmCmAmCmUmCfCmUfCmCmAmU |
| | | | | mUmGmAmCmAmApsmUpsmU | | psmUpsmU |
| 470 | 1372 | 419 | 437 | mApsmUpsmGmCfCmUfUfGfGmUmAmUmG | 1954 | vmCpsfApsmGmGmAfAmCmAmUmAmCmCmAfAmGfGmCmAmU |
| | | | | mUmUmCmCmUmGpsmUpsmU | | psmUpsmU |
| 471 | 1373 | 377 | 395 | mApsmCpsmGmUfUmCfUfGfGmUmGmUmC | 1955 | vmApsfApsmGmUmCfAmGmAmCmAmCmCmAfGmAfAmCmGmU |
| | | | | mUmGmAmCmUmUpsmUpsmU | | psmUpsmU |
| 472 | 1374 | 386 | 404 | mUpsmGpsmUmCfUmGfAfCfUmUmUmCmG | 1956 | vmUpsfUpsmGmGmAfCmCmGmAmAmAmGmUfCmAfGmAmCmA |
| | | | | mGmUmCmCmAmApsmUpsmU | | psmUpsmU |
| 473 | 1375 | 398 | 416 | mGpsmGpsmUmCfCmAfAfAfGmAmCmGmAm | 1957 | vmApsfCpsmGmAmCfUmUmCmGmUmCmUmUfUmGfGmAmCmC |
| | | | | AmGmUmCmGmUpsmUpsmU | | psmUpsmU |
| 474 | 1376 | 502 | 520 | mGpsmGpsmAmGfUmGfAfGfUmGmAmCmA | 1958 | vmGpsfUpsmAmCmGfUmUmGmUmCmAmCmUfCmAfCmUmCmC |
| | | | | mAmCmGmUmAmCpsmUpsmU | | psmUpsmU |
| 475 | 1377 | 532 | 550 | mGpsmCpsmCmAfAmAfAfCfAmAmCmCmAm | 1959 | vmCpsfGpsmGmUmGfAmUmGmGmUmUmGmUfUmUfUmGmGm |
| | | | | UmCmAmCmCmGpsmUpsmU | | CpsmUpsmU |
| 476 | 1378 | 382 | 400 | mCpsmUpsmGmGfUmGfUfCfUmGmAmCmU | 1960 | vmApsfCpsmCmGmAfAmAmGmUmCmAmGmAfCmAfCmCmAmG |
| | | | | mUmUmCmGmGmUpsmUpsmU | | psmUpsmU |
| 477 | 1379 | 378 | 396 | mCpsmGpsmUmUfCmUfGfGfUmGmUmCmU | 1961 | vmApsfApsmAmGmUfCmAmGmAmCmAmCmCfAmGfAmAmCmG |
| | | | | mGmAmCmUmUmUpsmUpsmU | | psmUpsmU |
| 478 | 1380 | 575 | 593 | mApsmCpsmAmUfCmUfGfCfCmCmUmAmAm | 1962 | vmUpsfUpsmGmAmCfUmUmUmAmGmGmGmCfAmGfAmUmGm |
| | | | | AmGmUmCmAmApsmUpsmU | | UpsmUpsmU |
| 479 | 1381 | 372 | 390 | mGpsmGpsmAmAfAmAfCfGfUmUmCmUmG | 1963 | vmApsfGpsmAmCmAfCmCmAmGmAmAmCmGfUmUfUmUmCmC |
| | | | | mGmUmGmUmCmUpsmUpsmU | | psmUpsmU |
| 480 | 1382 | 387 | 405 | mGpsmUpsmCmUfGmAfCfUfUmUmCmGmG | 1964 | vmUpsfUpsmUmGmGfAmCmCmGmAmAmAmGfUmCfAmGmAmC |
| | | | | mUmCmCmAmAmApsmUpsmU | | psmUpsmU |
| 481 | 1383 | 375 | 393 | mApsmApsmAmCfGmUfUfCfUmGmGmUmG | 1965 | vmGpsfUpsmCmAmGfAmCmAmCmCmAmGmAfAmCfGmUmUmU |
| | | | | mUmCmUmGmAmCpsmUpsmU | | psmUpsmU |
| 482 | 1384 | 1080 | 1098 | mGpsmCpsmCmUfGmUfGfGfAmAmUmCmU | 1966 | vmApsfApsmUmGmGfCmAmGmAmUmUmCmCfAmCfAmGmGmC |
| | | | | mGmCmCmAmUmUpsmUpsmU | | psmUpsmU |
| 483 | 1385 | 1039 | 1057 | mCpsmCpsmCmAfUmUfAfGfGmAmUmAmAm | 1967 | vmApsfApsmGmAmCfAmUmUmAmUmCmCmUfAmAfUmGmGm |
| | | | | UmGmUmCmUmUpsmUpsmU | | GpsmUpsmU |
| 484 | 1386 | 415 | 433 | mGpsmUpsmGmGfAmUfGfCfCmUmUmGmG | 1968 | vmApsfApsmCmAmUfAmCmCmAmAmGmGmCfAmUfCmCmAmC |
| | | | | mUmAmUmGmUmUpsmUpsmU | | psmUpsmU |
| 485 | 1387 | 402 | 420 | mCpsmApsmAmAfGmAfCfGfAmAmGmUmCm | 1969 | vmApsfUpsmCmCmAfCmGmAmCmUmUmCmGfUmCfUmUmUmG |
| | | | | GmUmGmGmAmUpsmUpsmU | | psmUpsmU |
| 486 | 1388 | 416 | 434 | mUpsmGpsmGmAfUmGfCfCfUmUmGmGmU | 1970 | vmGpsfApsmAmCmAfUmAmCmCmAmAmGmGfCmAfUmCmCmA |
| | | | | mAmUmGmUmUmCpsmUpsmU | | psmUpsmU |
| 487 | 1389 | 107 | 127 | fUpsmCpsfCmUfCmCfGmCfGmAfCmGfCmGfC | 1971 | mApsfCpsmAfUmGfCmGfCmGfCmGfUmCfGmCfGmGfAmGfGmAp |
| | | | | mGfCmAfUmGpsfU | | smUpsmU |
| 488 | 1390 | 108 | 128 | fCpsmCpsfUmCfCmGfCmGfAmCfGmCfGmCfG | 1972 | mApsfApsmCfAmUfGmCfGmCfGmCfGmUfCmGfCmGfGmAfGmGp |
| | | | | mCfAmUfGmUpsfU | | smUpsmU |
| 489 | 1391 | 109 | 129 | fCpsmUpsfCmCfGmCfGmAfCmGfCmGfCmGfC | 1973 | mCpsfApsmAfCmAfUmGfCmGfCmGfCmGfUmCfGmCfGmGfAmGp |
| | | | | mAfUmGfUmUpsfG | | smUpsmU |
| 490 | 1392 | 110 | 130 | fUpsmCpsfCmGfCmGfAmCfGmCfGmCfGmCfA | 1974 | mApsfCpsmAfAmCfAmUfGmCfGmCfGmCfGmUfCmGfCmGfGmAp |
| | | | | mUfGmUfUmGpsfU | | smUpsmU |
| 491 | 1393 | 111 | 131 | fCpsmCpsfGmCfGmAfCmGfCmGfCmGfCmAfU | 1975 | mApsfApsmCfAmAfCmAfUmGfCmGfCmGfCmGfUmCfGmCfGmGp |
| | | | | mGfUmUfGmUpsfU | | smUpsmU |
| 492 | 1394 | 113 | 133 | fGpsmCpsfGmAfCmGfCmGfCmGfCmAfUmGfU | 1976 | mCpsfGpsmAfAmCfAmAfCmAfUmGfCmGfCmGfCmGfUmCfGmCps |
| | | | | mUfGmUfUmCpsfG | | mUpsmU |
| 493 | 1395 | 114 | 134 | fCpsmGpsfAmCfGmCfGmCfGmCfAmUfGmUfU | 1977 | mCpsfCpsmGfAmAfCmAfAmCfAmUfGmCfGmCfGmCfGmUfCmGps |
| | | | | mGfUmUfCmGpsfG | | mUpsmU |
| 494 | 1396 | 115 | 135 | fGpsmApsfCmGfCmGfCmGfCmAfUmGfUmUf | 1978 | mGpsfCpsmCfGmAfAmCfAmAfCmAfUmGfCmGfCmGfCmGfUmCps |
| | | | | GmUfUmCfGmGpsfC | | mUpsmU |
| 495 | 1397 | 213 | 233 | fUpsmCpsfUmUfGmUfGmCfGmGfAmAfGmGf | 1979 | mCpsfUpsmCfCmUfGmGfCmCfUmUfCmCfGmCfAmCfAmAfGmAps |
| | | | | CmCfAmGfGmApsfG | | mUpsmU |
| 496 | 1398 | 214 | 234 | fCpsmUpsfUmGfUmGfCmGfGmAfAmGfGmCf | 1980 | mApsfCpsmUfCmCfUmGfGmCfCmUfUmCfCmGfCmAfCmAfAmGps |
| | | | | CmAfGmGfAmGpsfU | | mUpsmU |
| 497 | 1399 | 216 | 236 | fUpsmGpsfUmGfCmGfGmAfAmGfGmCfCmAf | 1981 | mCpsfGpsmAfCmUfCmCfUmGfGmCfCmUfUmCfCmGfCmAfCmAps |
| | | | | GmGfAmGfUmCpsfG | | mUpsmU |
| 498 | 1400 | 218 | 238 | fUpsmGpsfCmGfGmAfAmGfGmCfCmAfGmGf | 1982 | mUpsfCpsmCfGmAfCmUfCmCfUmGfGmCfCmUfUmCfCmGfCmAps |
| | | | | AmGfUmCfGmGpsfA | | mUpsmU |
| 499 | 1401 | 220 | 240 | fCpsmGpsfGmAfAmGfGmCfCmAfGmGfAmGf | 1983 | mGpsfUpsmUfCmCfGmAfCmUfCmCfUmGfGmCfCmUfUmCfCmGp |
| | | | | UmCfGmGfAmApsfC | | smUpsmU |
| 500 | 1402 | 223 | 243 | fApsmApsfGmGfCmCfAmGfGmAfGmUfCmGf | 1984 | mApsfApsmUfGmUfUmCfCmGfAmCfUmCfCmUfGmGfCmCfUmUp |
| | | | | GmAfAmCfAmUpsfU | | smUpsmU |
| 501 | 1403 | 224 | 244 | fApsmGpsfGmCfCmAfGmGfAmGfUmCfGmGf | 1985 | mCpsfApsmAfUmGfUmUfCmCfGmAfCmUfCmCfUmGfGmCfCmUp |
| | | | | AmAfCmAfUmUpsfG | | smUpsmU |
| 502 | 1404 | 225 | 245 | fGpsmGpsfCmCfAmGfGmAfGmUfCmGfGmAf | 1986 | mCpsfCpsmAfAmUfGmUfUmCfCmGfAmCfUmCfCmUfGmGfCmCp |
| | | | | AmCfAmUfUmGpsfG | | smUpsmU |
| 503 | 1405 | 229 | 249 | fApsmGpsfGmAfGmUfCmGfGmAfAmCfAmUf | 1987 | mGpsfApsmUfGmCfCmAfAmUfGmUfUmCfCmGfAmCfUmCfCmUp |
| | | | | UmGfGmCfAmUpsfC | | smUpsmU |
| 504 | 1406 | 311 | 331 | fCpsmCpsfAmAfUmGfUmCfCmAfCmCfAmGfC | 1988 | mApsfGpsmAfUmGfAmGfCmUfGmGfUmGfGmAfCmAfUmUfGmG |
| | | | | mUfCmAfUmCpsfU | | psmUpsmU |
| 505 | 1407 | 312 | 332 | fCpsmApsfAmUfGmUfCmCfAmCfCmAfGmCfU | 1989 | mGpsfApsmGfAmUfGmAfGmCfUmGfGmUfGmGfAmCfAmUfUmG |
| | | | | mCfAmUfCmUpsfC | | psmUpsmU |
| 506 | 1408 | 314 | 334 | fApsmUpsfGmUfCmCfAmCfCmAfGmCfUmCfA | 1990 | mCpsfGpsmGfAmGfAmUfGmAfGmCfUmGfGmUfGmGfAmCfAmU |
| | | | | mUfCmUfCmCpsfG | | psmUpsmU |
| 507 | 1409 | 315 | 335 | fUpsmGpsfUmCfCmAfCmCfAmGfCmUfCmAfU | 1991 | mCpsfCpsmGfGmAfGmAfUmGfAmGfCmUfGmGfUmGfGmAfCmA |
| | | | | mCfUmCfCmGpsfG | | psmUpsmU |
| 508 | 1410 | 316 | 336 | fGpsmUpsfCmCfAmCfCmAfGmCfUmCfAmUfC | 1992 | mGpsfCpsmCfGmGfAmGfAmUfGmAfGmCfUmGfGmUfGmGfAmC |
| | | | | mUfCmCfGmGpsfC | | psmUpsmU |
| 509 | 1411 | 317 | 337 | fUpsmCpsfCmAfCmCfAmGfCmUfCmAfUmCfU | 1993 | mUpsfGpsmCfCmGfGmAfGmAfUmGfAmGfCmUfGmGfUmGfGmA |
| | | | | mCfCmGfGmCpsfA | | psmUpsmU |
| 510 | 1412 | 319 | 339 | fCpsmApsfCmCfAmGfCmUfCmAfUmCfUmCfC | 1994 | mUpsfUpsmUfGmCfCmGfGmAfGmAfUmGfAmGfCmUfGmGfUmG |
| | | | | mGfGmCfAmApsfA | | psmUpsmU |
| 511 | 1413 | 351 | 371 | fUpsmCpsfUmUfAmCfCmAfGmAfGmUfGmUf | 1995 | mCpsfCpsmAfUmCfAmGfAmCfAmCfUmCfUmGfGmUfAmAfGmAp |
| | | | | CmUfGmAfUmGpsfG | | smUpsmU |
| 512 | 1414 | 352 | 372 | fCpsmUpsfUmAfCmCfAmGfAmGfUmGfUmCf | 1996 | mCpsfCpsmCfAmUfCmAfGmAfCmAfCmUfCmUfGmGfUmAfAmGp |
| | | | | UmGfAmUfGmGpsfG | | smUpsmU |
| 513 | 1415 | 353 | 373 | fUpsmUpsfAmCfCmAfGmAfGmUfGmUfCmUf | 1997 | mCpsfCpsmCfCmAfUmCfAmGfAmCfAmCfUmCfUmGfGmUfAmAps |
| | | | | GmAfUmGfGmGpsfG | | mUpsmU |
| 514 | 1416 | 354 | 374 | fUpsmApsfCmCfAmGfAmGfUmGfUmCfUmGf | 1998 | mUpsfCpsmCfCmCfAmUfCmAfGmAfCmAfCmUfCmUfGmGfUmAp |
| | | | | AmUfGmGfGmGpsfA | | smUpsmU |
| 515 | 1417 | 357 | 377 | fCpsmApsfGmAfGmUfGmUfCmUfGmAfUmGf | 1999 | mUpsfUpsmUfUmCfCmCfCmAfUmCfAmGfAmCfAmCfUmCfUmGp |
| | | | | GmGfGmAfAmApsfA | | smUpsmU |
| 516 | 1418 | 358 | 378 | fApsmGpsfAmGfUmGfUmCfUmGfAmUfGmGf | 2000 | mGpsfUpsmUfUmUfCmCfCmCfAmUfCmAfGmAfCmAfCmUfCmUp |
| | | | | GmGfAmAfAmApsfC | | smUpsmU |
| 517 | 1419 | 359 | 379 | fGpsmApsfGmUfGmUfCmUfGmAfUmGfGmGf | 2001 | mCpsfGpsmUfUmUfUmCfCmCfCmAfUmCfAmGfAmCfAmCfUmCps |
| | | | | GmAfAmAfAmCpsfG | | mUpsmU |
| 518 | 1420 | 360 | 380 | fApsmGpsfUmGfUmCfUmGfAmUfGmGfGmGf | 2002 | mApsfCpsmGfUmUfUmUfCmCfCmCfAmUfCmAfGmAfCmAfCmUp |
| | | | | AmAfAmAfCmGpsfU | | smUpsmU |
| 519 | 1421 | 361 | 381 | fGpsmUpsfGmUfCmUfGmAfUmGfGmGfGmAf | 2003 | mApsfApsmCfGmUfUmUfUmCfCmCfCmAfUmCfAmGfAmCfAmCps |
| | | | | AmAfAmCfGmUpsfU | | mUpsmU |
| 520 | 1422 | 362 | 382 | fUpsmGpsfUmCfUmGfAmUfGmGfGmGfAmAf | 2004 | mGpsfApsmAfCmGfUmUfUmUfCmCfCmCfAmUfCmAfGmAfCmAp |
| | | | | AmAfCmGfUmUpsfC | | smUpsmU |
| 521 | 1423 | 363 | 383 | fGpsmUpsfCmUfGmAfUmGfGmGfGmAfAmAf | 2005 | mApsfGpsmAfAmCfGmUfUmUfUmCfCmCfCmAfUmCfAmGfAmCp |
| | | | | AmCfGmUfUmCpsfU | | smUpsmU |
| 522 | 1424 | 364 | 384 | fUpsmCpsfUmGfAmUfGmGfGmGfAmAfAmAf | 2006 | mCpsfApsmGfAmAfCmGfUmUfUmUfCmCfCmCfAmUfCmAfGmAp |
| | | | | CmGfUmUfCmUpsfG | | smUpsmU |
| 523 | 1425 | 365 | 385 | fCpsmUpsfGmAfUmGfGmGfGmAfAmAfAmCf | 2007 | mCpsfCpsmAfGmAfAmCfGmUfUmUfUmCfCmCfCmAfUmCfAmGp |
| | | | | GmUfUmCfUmGpsfG | | smUpsmU |
| 524 | 1426 | 366 | 386 | fUpsmGpsfAmUfGmGfGmGfAmAfAmAfCmGf | 2008 | mApsfCpsmCfAmGfAmAfCmGfUmUfUmUfCmCfCmCfAmUfCmAps |
| | | | | UmUfCmUfGmGpsfU | | mUpsmU |
| 525 | 1427 | 367 | 387 | fGpsmApsfUmGfGmGfGmAfAmAfAmCfGmUf | 2009 | mCpsfApsmCfCmAfGmAfAmCfGmUfUmUfUmCfCmCfCmAfUmCps |
| | | | | UmCfUmGfGmUpsfG | | mUpsmU |
| 526 | 1428 | 369 | 389 | fUpsmGpsfGmGfGmAfAmAfAmCfGmUfUmCf | 2010 | mGpsfApsmCfAmCfCmAfGmAfAmCfGmUfUmUfUmCfCmCfCmAps |
| | | | | UmGfGmUfGmUpsfC | | mUpsmU |
| 527 | 1429 | 371 | 391 | fGpsmGpsfGmAfAmAfAmCfGmUfUmCfUmGf | 2011 | mCpsfApsmGfAmCfAmCfCmAfGmAfAmCfGmUfUmUfUmCfCmCps |
| | | | | GmUfGmUfCmUpsfG | | mUpsmU |
| 528 | 1430 | 372 | 392 | fGpsmGpsfAmAfAmAfCmGfUmUfCmUfGmGf | 2012 | mUpsfCpsmAfGmAfCmAfCmCfAmGfAmAfCmGfUmUfUmUfCmCp |
| | | | | UmGfUmCfUmGpsfA | | smUpsmU |
| 529 | 1431 | 375 | 395 | fApsmApsfAmCfGmUfUmCfUmGfGmUfGmUf | 2013 | mApsfApsmGfUmCfAmGfAmCfAmCfCmAfGmAfAmCfGmUfUmUp |
| | | | | CmUfGmAfCmUpsfU | | smUpsmU |
| 530 | 1432 | 376 | 396 | fApsmApsfCmGfUmUfCmUfGmGfUmGfUmCf | 2014 | mApsfApsmAfGmUfCmAfGmAfCmAfCmCfAmGfAmAfCmGfUmUp |
| | | | | UmGfAmCfUmUpsfU | | smUpsmU |
| 531 | 1433 | 377 | 397 | fApsmCpsfGmUfUmCfUmGfGmUfGmUfCmUf | 2015 | mGpsfApsmAfAmGfUmCfAmGfAmCfAmCfCmAfGmAfAmCfGmUp |
| | | | | GmAfCmUfUmUpsfC | | smUpsmU |
| 532 | 1434 | 378 | 398 | fCpsmGpsfUmUfCmUfGmGfUmGfUmCfUmGf | 2016 | mCpsfGpsmAfAmAfGmUfCmAfGmAfCmAfCmCfAmGfAmAfCmGps |
| | | | | AmCfUmUfUmCpsfG | | mUpsmU |
| 533 | 1435 | 382 | 402 | fCpsmUpsfGmGfUmGfUmCfUmGfAmCfUmUf | 2017 | mGpsfGpsmAfCmCfGmAfAmAfGmUfCmAfGmAfCmAfCmCfAmGp |
| | | | | UmCfGmGfUmCpsfC | | smUpsmU |
| 534 | 1436 | 383 | 403 | fUpsmGpsfGmUfGmUfCmUfGmAfCmUfUmUf | 2018 | mUpsfGpsmGfAmCfCmGfAmAfAmGfUmCfAmGfAmCfAmCfCmAp |
| | | | | CmGfGmUfCmCpsfA | | smUpsmU |
| 535 | 1437 | 354 | 374 | mUpsmApsmCmCmAmGfAmGfUfGfUmCmU | 2019 | mUpsfCpsmCmCmCfAmUmCmAmGmAmCmAfCmUfCmUmGmG |
| | | | | mGmAmUmGmGmGmGpsmA | | mUmApsmUpsmU |
| 536 | 1438 | 385 | 405 | mGpsmUpsmGmUmCmUfGmAfCfUfUmUmC | 2020 | mUpsfUpsmUmGmGfAmCmCmGmAmAmAmGfUmCfAmGmAmC |
| | | | | mGmGmUmCmCmAmApsmA | | mAmCpsmUpsmU |
| 537 | 1439 | 400 | 420 | mUpsmCpsmCmAmAmAfGmAfCfGfAmAmGm | 2021 | mApsfUpsmCmCmAfCmGmAmCmUmUmCmGfUmCfUmUmUmG |
| | | | | UmCmGmUmGmGmApsmU | | mGmApsmUpsmU |
| 538 | 1440 | 409 | 429 | mGpsmApsmAmGmUmCfGmUfGfGfAmUmG | 2022 | mUpsfApsmCmCmAfAmGmGmCmAmUmCmCfAmCfGmAmCmU |
| | | | | mCmCmUmUmGmGmUpsmA | | mUmCpsmUpsmU |
| 539 | 1441 | 412 | 432 | mGpsmUpsmCmGmUmGfGmAfUfGfCmCmU | 2023 | mApsfCpsmAmUmAfCmCmAmAmGmGmCmAfUmCfCmAmCmGm |
| | | | | mUmGmGmUmAmUmGpsmU | | AmCpsmUpsmU |
| 540 | 1442 | 413 | 433 | mUpsmCpsmGmUmGmGfAmUfGfCfCmUmU | 2024 | mApsfApsmCmAmUfAmCmCmAmAmGmGmCfAmUfCmCmAmCm |
| | | | | mGmGmUmAmUmGmUpsmU | | GmApsmUpsmU |
| 541 | 1443 | 421 | 441 | mGpsmCpsmCmUmUmGfGmUfAfUfGmUmU | 2025 | mGpsfApsmAmGmCfAmGmGmAmAmCmAmUfAmCfCmAmAmG |
| | | | | mCmCmUmGmCmUmUpsmC | | mGmCpsmUpsmU |
| 542 | 1444 | 530 | 550 | mApsmUpsmGmCmCmAfAmAfAfCfAmAmCm | 2026 | mCpsfGpsmGmUmGfAmUmGmGmUmUmGmUfUmUfUmGmGm |
| | | | | CmAmUmCmAmCmCpsmG | | CmAmUpsmUpsmU |
| 543 | 1445 | 533 | 553 | mCpsmCpsmAmAmAmAfCmAfAfCfCmAmUm | 2027 | mApsfCpsmAmCmGfGmUmGmAmUmGmGmUfUmGfUmUmUmU |
| | | | | CmAmCmCmGmUmGpsmU | | mGmGpsmUpsmU |
| 544 | 1446 | 573 | 593 | mCpsmGpsmAmCmAmUfCmUfGfCfCmCmUm | 2028 | mUpsfUpsmGmAmCfUmUmUmAmGmGmGmCfAmGfAmUmGmU |
| | | | | AmAmAmGmUmCmApsmA | | mCmGpsmUpsmU |
| 545 | 1447 | 619 | 639 | mApsmUpsmCmAmCmCfAmAfGfCfUmCmAm | 2029 | mGpsfCpsmGmUmAfGmAmCmUmGmAmGmCfUmUfGmGmUmG |
| | | | | GmUmCmUmAmCmGpsmC | | mAmUpsmUpsmU |
| 546 | 1448 | 1039 | 1059 | mCpsmCpsmCmAmUmUfAmGfGfAfUmAmAm | 2030 | mApsfUpsmAmAmGfAmCmAmUmUmAmUmCfCmUfAmAmUmG |
| | | | | UmGmUmCmUmUmApsmU | | mGmGpsmUpsmU |
| 547 | 1449 | 354 | 374 | mUpsmApsmCmCmAmGfAmGfUfGfUmCmU | 2031 | vmUpsfCpsmCmCmCfAmUmCmAmGmAmCmAfCmUfCmUmGmG |
| | | | | mGmAmUmGmGmGmGpsmA | | mUmApsmUpsmU |
| 548 | 1450 | 385 | 405 | mGpsmUpsmGmUmCmUfGmAfCfUfUmUmC | 2032 | vmUpsfUpsmUmGmGfAmCmCmGmAmAmAmGfUmCfAmGmAmC |
| | | | | mGmGmUmCmCmAmApsmA | | mAmCpsmUpsmU |
| 549 | 1451 | 400 | 420 | mUpsmCpsmCmAmAmAfGmAfCfGfAmAmGm | 2033 | vmApsfUpsmCmCmAfCmGmAmCmUmUmCmGfUmCfUmUmUmG |
| | | | | UmCmGmUmGmGmApsmU | | mGmApsmUpsmU |
| 550 | 1452 | 409 | 429 | mGpsmApsmAmGmUmCfGmUfGfGfAmUmG | 2034 | vmUpsfApsmCmCmAfAmGmGmCmAmUmCmCfAmCfGmAmCmU |
| | | | | mCmCmUmUmGmGmUpsmA | | mUmCpsmUpsmU |
| 551 | 1453 | 412 | 432 | mGpsmUpsmCmGmUmGfGmAfUfGfCmCmU | 2035 | vmApsfCpsmAmUmAfCmCmAmAmGmGmCmAfUmCfCmAmCmG |
| | | | | mUmGmGmUmAmUmGpsmU | | mAmCpsmUpsmU |
| 552 | 1454 | 413 | 433 | mUpsmCpsmGmUmGmGfAmUfGfCfCmUmU | 2036 | vmApsfApsmCmAmUfAmCmCmAmAmGmGmCfAmUfCmCmAmC |
| | | | | mGmGmUmAmUmGmUpsmU | | mGmApsmUpsmU |
| 553 | 1455 | 421 | 441 | mGpsmCpsmCmUmUmGfGmUfAfUfGmUmU | 2037 | vmGpsfApsmAmGmCfAmGmGmAmAmCmAmUfAmCfCmAmAmG |
| | | | | mCmCmUmGmCmUmUpsmC | | mGmCpsmUpsmU |
| 554 | 1456 | 530 | 550 | mApsmUpsmGmCmCmAfAmAfAfCfAmAmCm | 2038 | vmCpsfGpsmGmUmGfAmUmGmGmUmUmGmUfUmUfUmGmGm |
| | | | | CmAmUmCmAmCmCpsmG | | CmAmUpsmUpsmU |
| 555 | 1457 | 533 | 553 | mCpsmCpsmAmAmAmAfCmAfAfCfCmAmUm | 2039 | vmApsfCpsmAmCmGfGmUmGmAmUmGmGmUfUmGfUmUmUm |
| | | | | CmAmCmCmGmUmGpsmU | | UmGmGpsmUpsmU |
| 556 | 1458 | 573 | 593 | mCpsmGpsmAmCmAmUfCmUfGfCfCmCmUm | 2040 | vmUpsfUpsmGmAmCfUmUmUmAmGmGmGmCfAmGfAmUmGm |
| | | | | AmAmAmGmUmCmApsmA | | UmCmGpsmUpsmU |
| 557 | 1459 | 619 | 639 | mApsmUpsmCmAmCmCfAmAfGfCfUmCmAm | 2041 | vmGpsfCpsmGmUmAfGmAmCmUmGmAmGmCfUmUfGmGmUm |
| | | | | GmUmCmUmAmCmGpsmC | | GmAmUpsmUpsmU |
| 558 | 1460 | 1039 | 1059 | mCpsmCpsmCmAmUmUfAmGfGfAfUmAmAm | 2042 | vmApsfUpsmAmAmGfAmCmAmUmUmAmUmCfCmUfAmAmUm |
| | | | | UmGmUmCmUmUmApsmU | | GmGmGpsmUpsmU |
| 559 | 1461 | 354 | 374 | mUpsmApsmCmCfAmGmAmGfUfGfUmCmUf | 2043 | mUpsfCpsmCmCmCmAmUmCmAmGmAmCmAfCmUmCmUmGm |
| | | | | GmAmUmGmGfGmGpsmA | | GmUmApsmUpsmU |
| 560 | 1462 | 385 | 405 | mGpsmUpsmGmUfCmUmGmAfCfUfUmUmCf | 2044 | mUpsfUpsmUmGmGmAmCmCmGmAmAmAmGfUmCmAmGmAm |
| | | | | GmGmUmCmCfAmApsmA | | CmAmCpsmUpsmU |
| 561 | 1463 | 400 | 420 | mUpsmCpsmCmAfAmAmGmAfCfGfAmAmGfU | 2045 | mApsfUpsmCmCmAmCmGmAmCmUmUmCmGfUmCmUmUmUm |
| | | | | mCmGmUmGfGmApsmU | | GmGmApsmUpsmU |
| 562 | 1464 | 409 | 429 | mGpsmApsmAmGfUmCmGmUfGfGfAmUmGf | 2046 | mUpsfApsmCmCmAmAmGmGmCmAmUmCmCfAmCmGmAmCm |
| | | | | CmCmUmUmGfGmUpsmA | | UmUmCpsmUpsmU |
| 563 | 1465 | 412 | 432 | mGpsmUpsmCmGfUmGmGmAfUfGfCmCmUf | 2047 | mApsfCpsmAmUmAmCmCmAmAmGmGmCmAfUmCmCmAmCm |
| | | | | UmGmGmUmAfUmGpsmU | | GmAmCpsmUpsmU |
| 564 | 1466 | 413 | 433 | mUpsmCpsmGmUfGmGmAmUfGfCfCmUmUf | 2048 | mApsfApsmCmAmUmAmCmCmAmAmGmGmCfAmUmCmCmAm |
| | | | | GmGmUmAmUfGmUpsmU | | CmGmApsmUpsmU |
| 565 | 1467 | 421 | 441 | mGpsmCpsmCmUfUmGmGmUfAfUfGmUmUf | 2049 | mGpsfApsmAmGmCmAmGmGmAmAmCmAmUfAmCmCmAmAm |
| | | | | CmCmUmGmCfUmUpsmC | | GmGmCpsmUpsmU |
| 566 | 1468 | 530 | 550 | mApsmUpsmGmCfCmAmAmAfAfCfAmAmCfC | 2050 | mCpsfGpsmGmUmGmAmUmGmGmUmUmGmUfUmUmUmGmG |
| | | | | mAmUmCmAfCmCpsmG | | mCmAmUpsmUpsmU |
| 567 | 1469 | 533 | 553 | mCpsmCpsmAmAfAmAmCmAfAfCfCmAmUfC | 2051 | mApsfCpsmAmCmGmGmUmGmAmUmGmGmUfUmGmUmUmU |
| | | | | mAmCmCmGfUmGpsmU | | mUmGmGpsmUpsmU |
| 568 | 1470 | 573 | 593 | mCpsmGpsmAmCfAmUmCmUfGfCfCmCmUfA | 2052 | mUpsfUpsmGmAmCmUmUmUmAmGmGmGmCfAmGmAmUmG |
| | | | | mAmAmGmUfCmApsmA | | mUmCmGpsmUpsmU |
| 569 | 1471 | 619 | 639 | mApsmUpsmCmAfCmCmAmAfGfCfUmCmAfG | 2053 | mGpsfCpsmGmUmAmGmAmCmUmGmAmGmCfUmUmGmGmU |
| | | | | mUmCmUmAfCmGpsmC | | mGmAmUpsmUpsmU |
| 570 | 1472 | 1039 | 1059 | mCpsmCpsmCmAfUmUmAmGfGfAfUmAmAf | 2054 | mApsfUpsmAmAmGmAmCmAmUmUmAmUmCfCmUmAmAmUm |
| | | | | UmGmUmCmUfUmApsmU | | GmGmGpsmUpsmU |
| 571 | 1473 | 354 | 374 | mUpsmApsmCmCfAmGmAmGfUfGfUmCmUf | 2055 | vmUpsfCpsmCmCmCmAmUmCmAmGmAmCmAfCmUmCmUmG |
| | | | | GmAmUmGmGfGmGpsmA | | mGmUmApsmUpsmU |
| 572 | 1474 | 385 | 405 | mGpsmUpsmGmUfCmUmGmAfCfUfUmUmCf | 2056 | vmUpsfUpsmUmGmGmAmCmCmGmAmAmAmGfUmCmAmGmA |
| | | | | GmGmUmCmCfAmApsmA | | mCmAmCpsmUpsmU |
| 573 | 1475 | 400 | 420 | mUpsmCpsmCmAfAmAmGmAfCfGfAmAmGfU | 2057 | vmApsfUpsmCmCmAmCmGmAmCmUmUmCmGfUmCmUmUmU |
| | | | | mCmGmUmGfGmApsmU | | mGmGmApsmUpsmU |
| 574 | 1476 | 409 | 429 | mGpsmApsmAmGfUmCmGmUfGfGfAmUmGf | 2058 | vmUpsfApsmCmCmAmAmGmGmCmAmUmCmCfAmCmGmAmC |
| | | | | CmCmUmUmGfGmUpsmA | | mUmUmCpsmUpsmU |
| 575 | 1477 | 412 | 432 | mGpsmUpsmCmGfUmGmGmAfUfGfCmCmUf | 2059 | vmApsfCpsmAmUmAmCmCmAmAmGmGmCmAfUmCmCmAmCm |
| | | | | UmGmGmUmAfUmGpsmU | | GmAmCpsmUpsmU |
| 576 | 1478 | 413 | 433 | mUpsmCpsmGmUfGmGmAmUfGfCfCmUmUf | 2060 | vmApsfApsmCmAmUmAmCmCmAmAmGmGmCfAmUmCmCmA |
| | | | | GmGmUmAmUfGmUpsmU | | mCmGmApsmUpsmU |
| 577 | 1479 | 421 | 441 | mGpsmCpsmCmUfUmGmGmUfAfUfGmUmUf | 2061 | vmGpsfApsmAmGmCmAmGmGmAmAmCmAmUfAmCmCmAmA |
| | | | | CmCmUmGmCfUmUpsmC | | mGmGmCpsmUpsmU |
| 578 | 1480 | 530 | 550 | mApsmUpsmGmCfCmAmAmAfAfCfAmAmCfC | 2062 | vmCpsfGpsmGmUmGmAmUmGmGmUmUmGmUfUmUmUmGm |
| | | | | mAmUmCmAfCmCpsmG | | GmCmAmUpsmUpsmU |
| 579 | 1481 | 533 | 553 | mCpsmCpsmAmAfAmAmCmAfAfCfCmAmUfC | 2063 | vmApsfCpsmAmCmGmGmUmGmAmUmGmGmUfUmGmUmUmU |
| | | | | mAmCmCmGfUmGpsmU | | mUmGmGpsmUpsmU |
| 580 | 1482 | 573 | 593 | mCpsmGpsmAmCfAmUmCmUfGfCfCmCmUfA | 2064 | vmUpsfUpsmGmAmCmUmUmUmAmGmGmGmCfAmGmAmUmG |
| | | | | mAmAmGmUfCmApsmA | | mUmCmGpsmUpsmU |
| 581 | 1483 | 619 | 639 | mApsmUpsmCmAfCmCmAmAfGfCfUmCmAfG | 2065 | vmGpsfCpsmGmUmAmGmAmCmUmGmAmGmCfUmUmGmGmU |
| | | | | mUmCmUmAfCmGpsmC | | mGmAmUpsmUpsmU |
| 582 | 1484 | 1039 | 1059 | mCpsmCpsmCmAfUmUmAmGfGfAfUmAmAf | 2066 | vmApsfUpsmAmAmGmAmCmAmUmUmAmUmCfCmUmAmAmU |
| | | | | UmGmUmCmUfUmApsmU | | mGmGmGpsmUpsmU |
| 583 | 2148 | | | mApsmUpsmGmCfCmUfUfGfGmUmAmUmG | 1936 | mCpsfApsmGmGmAfAmCmAmUmAmCmCmAfAmGfGmCmAmUp |
| | | | | mUmUmCmCmUmG-GalNAc4-ps-GalNAc4- | | smUpsmU |
| | | | | ps-GalNAc4 | | |
| 584 | 2148 | | | mApsmUpsmGmCfCmUfUfGfGmUmAmUmG | 2188 | vmCpsfApsmGmGmAfAmCmAmUmAmCmCmAfAmGfGmCmAmU |
| | | | | mUmUmCmCmUmG-GalNAc4-ps-GalNAc4- | | psmUpsmU |
| | | | | ps-GalNAc4 | | |
| 585 | 2293 | | | mApsmUpsmGmGfAmGfGfAfGmUmGmAm | 2317 | mUpsfUpsmGmUmCfAmCmUmCmAmCmUmCfCmUfCmCmAmUp |
| | | | | GmUmGmAmCmAmA-GalNAc4-ps-GalNAc4- | | smUpsmU |
| | | | | ps-GalNAc4 | | |
| 586 | 2293 | | | mApsmUpsmGmGfAmGfGfAfGmUmGmAm | 1953 | vmUpsfUpsmGmUmCfAmCmUmCmAmCmUmCfCmUfCmCmAmU |
| | | | | GmUmGmAmCmAmA-GalNAc4-ps-GalNAc4- | | psmUpsmU |
| | | | | ps-GalNAc4 | | |
| 587 | 2354 | | | mCpsmGpsmUmUfCmUfGfGfUmGmUmCmU | 1943 | mApsfApsmAmGmUfCmAmGmAmCmAmCmCfAmGfAmAmCmGp |
| | | | | mGmAmCmUmUmU-GalNAc4-ps-GalNAc4- | | smUpsmU |
| | | | | ps-GalNAc4 | | |
| 588 | 2354 | | | mCpsmGpsmUmUfCmUfGfGfUmGmUmCmU | 1961 | vmApsfApsmAmGmUfCmAmGmAmCmAmCmCfAmGfAmAmCmG |
| | | | | mGmAmCmUmUmU-GalNAc4-ps-GalNAc4- | | psmUpsmU |
| | | | | ps-GalNAc4 | | |
| 589 | 2297 | | | mGpsmUpsmGmUmCmUfGmAfCfUfUmUmC | 2321 | mUpsfUpsmUmGmGfAmCmCmGmAmAmAmGfUmCfAmGmAmC |
| | | | | mGmGmUmCmCmAmAmA-GalNAc4-ps- | | mAmCpsmUpsmU |
| | | | | GalNAc4-ps-GalNAc4 | | |
| 590 | 2173 | | | mGpsmUpsmGmUmCmUfGmAfCfUfUmUmC | 2213 | vmUpsfUpsmUmGmGfAmCmCmGmAmAmAmGfUmCfAmGmAmC |
| | | | | mGmGmUmCmCmAmAmA-GalNAc4-ps- | | mAmCpsmUpsmU |
| | | | | GalNAc4-ps-GalNAc4 | | |
| 591 | 2186 | | | mUpsmCpsmGmUmGmGfAmUfGfCfCmUmU | 2024 | mApsfApsmCmAmUfAmCmCmAmAmGmGmCfAmUfCmCmAmCm |
| | | | | mGmGmUmAmUmGmUmU-GalNAc4-ps- | | GmApsmUpsmU |
| | | | | GalNAc4-ps-GalNAc4 | | |
| 592 | 2292 | | | mUpsmCpsmGmUmGmGfAmUfGfCfCmUmU | 2316 | vmApsfApsmCmAmUfAmCmCmAmAmGmGmCfAmUfCmCmAmC |
| | | | | mGmGmUmAmUmGmUmU-GalNAc4-ps- | | mGmApsmUpsmU |
| | | | | GalNAc4-ps-GalNAc4 | | |
| 593 | 2294 | | | mApsmUpsmGmCmCmAfAmAfAfCfAmAmC | 2318 | mCpsfGpsmGmUmGfAmUmGmGmUmUmGmUfUmUfUmGmGm |
| | | | | mCmAmUmCmAmCmCmG-GalNAc4-ps- | | CmAmUpsmUpsmU |
| | | | | GalNAc4-ps-GalNAc4 | | |
| 594 | 2300 | | | mApsmUpsmGmCmCmAfAmAfAfCfAmAmC | 2324 | vmCpsfGpsmGmUmGfAmUmGmGmUmUmGmUfUmUfUmGmGm |
| | | | | mCmAmUmCmAmCmCmG-GalNAc4-ps- | | CmAmUpsmUpsmU |
| | | | | GalNAc4-ps-GalNAc4 | | |
| 595 | 2301 | | | mGpsmApsmAmGmUmCfGmUfGfGfAmUmG | 2022 | mUpsfApsmCmCmAfAmGmGmCmAmUmCmCfAmCfGmAmCmU |
| | | | | mCmCmUmUmGmGmUmA-GalNAc4-ps- | | mUmCpsmUpsmU |
| | | | | GalNAc4-ps-GalNAc4 | | |
| 596 | 2301 | | | mGpsmApsmAmGmUmCfGmUfGfGfAmUmG | 2325 | vmUpsfApsmCmCmAfAmGmGmCmAmUmCmCfAmCfGmAmCmU |
| | | | | mCmCmUmUmGmGmUmA-GalNAc4-ps- | | mUmCpsmUpsmU |
| | | | | GalNAc4-ps-GalNAc4 | | |
| 597 | 2295 | | | mGpsmApsmAmGfUmCmGmUfGfGfAmUmG | 2319 | mUpsfApsmCmCmAmAmGmGmCmAmUmCmCfAmCmGmAmCm |
| | | | | fCmCmUmUmGfGmUmA-GalNAc4-ps- | | UmUmCpsmUpsmU |
| | | | | GalNAc4-ps-GalNAc4 | | |
| 598 | 2296 | | | mGpsmApsmAmGfUmCmGmUfGfGfAmUmG | 2320 | vmUpsfApsmCmCmAmAmGmGmCmAmUmCmCfAmCmGmAmC |
| | | | | fCmCmUmUmGfGmUmA-GalNAc4-ps- | | mUmUmCpsmUpsmU |
| | | | | GalNAc4-ps-GalNAc4 | | |
| 599 | 2177 | | | mUpsmCpsmCmAmAmAfGmAfCfGfAmAmG | 2021 | mApsfUpsmCmCmAfCmGmAmCmUmUmCmGfUmCfUmUmUmG |
| | | | | mUmCmGmUmGmGmAmU-GalNAc4-ps- | | mGmApsmUpsmU |
| | | | | GalNAc4-ps-GalNAc4 | | |
| 600 | 2177 | | | mUpsmCpsmCmAmAmAfGmAfCfGfAmAmG | 2033 | vmApsfUpsmCmCmAfCmGmAmCmUmUmCmGfUmCfUmUmUmG |
| | | | | mUmCmGmUmGmGmAmU-GalNAc4-ps- | | mGmApsmUpsmU |
| | | | | GalNAc4-ps-GalNAc4 | | |
| 601 | 2291 | | | mGpsmUpsmCmGmUmGfGmAfUfGfCmCmU | 2023 | mApsfCpsmAmUmAfCmCmAmAmGmGmCmAfUmCfCmAmCmGm |
| | | | | mUmGmGmUmAmUmGmU-GalNAc4-ps- | | AmCpsmUpsmU |
| | | | | GalNAc4-ps-GalNAc4 | | |
| 602 | 2291 | | | mGpsmUpsmCmGmUmGfGmAfUfGfCmCmU | 2035 | vmApsfCpsmAmUmAfCmCmAmAmGmGmCmAfUmCfCmAmCmG |
| | | | | mUmGmGmUmAmUmGmU-GalNAc4-ps- | | mAmCpsmUpsmU |
| | | | | GalNAc4-ps-GalNAc4 | | |
| 603 | 2355 | | | mGpsmCpsmCmUmUmGfGmUfAfUfGmUm | 2025 | mGpsfApsmAmGmCfAmGmGmAmAmCmAmUfAmCfCmAmAmG |
| | | | | UmCmCmUmGmCmUmUmC-GalNAc4-ps- | | mGmCpsmUpsmU |
| | | | | GalNAc4-ps-GalNAc4 | | |
| 604 | 2355 | | | mGpsmCpsmCmUmUmGfGmUfAfUfGmUm | 2037 | vmGpsfApsmAmGmCfAmGmGmAmAmCmAmUfAmCfCmAmAmG |
| | | | | UmCmCmUmGmCmUmUmC-GalNAc4-ps- | | mGmCpsmUpsmU |
| | | | | GalNAc4-ps-GalNAc4 | | |
| 605 | 2356 | | | mGpsmCpsmCmUfUmGmGmUfAfUfGmUm | 2049 | mGpsfApsmAmGmCmAmGmGmAmAmCmAmUfAmCmCmAmAm |
| | | | | UfCmCmUmGmCfUmUmC-GalNAc4-ps- | | GmGmCpsmUpsmU |
| | | | | GalNAc4-ps-GalNAc4 | | |
| 606 | 2356 | | | mGpsmCpsmCmUfUmGmGmUfAfUfGmUm | 2061 | vmGpsfApsmAmGmCmAmGmGmAmAmCmAmUfAmCmCmAmA |
| | | | | UfCmCmUmGmCfUmUmC-GalNAc4-ps- | | mGmGmCpsmUpsmU |
| | | | | GalNAc4-ps-GalNAc4 | | |
| 607 | 2357 | | | mGpsmUpsmCmGfUmGmGmAfUfGfCmCmU | 2059 | vmApsfCpsmAmUmAmCmCmAmAmGmGmCmAfUmCmCmAmCm |
| | | | | fUmGmGmUmAfUmGmU-GalNAc4-ps- | | GmAmCpsmUpsmU |
| | | | | GalNAc4-ps-GalNAc4 | | |
| 608 | 2358 | | | mApsmUpsmGmCfCmAmAmAfAfCfAmAmCf | 2062 | vmCpsfGpsmGmUmGmAmUmGmGmUmUmGmUfUmUmUmGm |
| | | | | CmAmUmCmAfCmCmG-GalNAc4-ps- | | GmCmAmUpsmUpsmU |
| | | | | GalNAc4-ps-GalNAc4 | | |
| 609 | 2148 | | | mApsmUpsmGmCfCmUfUfGfGmUmAmUmG | 2188 | vmCpsfApsmGmGmAfAmCmAmUmAmCmCmAfAmGfGmCmAmU |
| | | | | mUmUmCmCmUmG- | | psmUpsmU |
| | | | | GalNAc 4psGalNAc4psGalNAc4 | | |
| 610 | 2149 | | | mApsmUpsmGmCfCmUfUfGfGmUmAmUmG | 2189 | mApsfApsmGmGmAfAmCmAmUmAmCmCmAfAmGfGmCmAmUp |
| | | | | mUmUmCmCmUmG-p-(ps)2-GalNAc4 | | smUpsmU |
| 611 | 2150 | | | mApsmUpsmGmCfCmUfUfGfGmUmAmUmG | 2190 | vmApsfApsmGmGmAfAmCmAmUmAmCmCmAfAmGfGmCmAmU |
| | | | | mUmUmCmCmUmG- | | psmUpsmU |
| | | | | GalNAc4psGalNAc4psGalNAc4 | | |
| 612 | 2151 | | | mApsmUpsmGmCfCmUfUfGfGmUmAmUmG | 2191 | mUpsfApsmGmGmAfAmCmAmUmAmCmCmAfAmGfGmCmAmUp |
| | | | | mUmUmCmCmUmG-p-(ps)2-GalNAc4 | | smUpsmU |
| 613 | 2152 | | | mApsmUpsmGmCfCmUfUfGfGmUmAmUmG | 2192 | vmUpsfApsmGmGmAfAmCmAmUmAmCmCmAfAmGfGmCmAmU |
| | | | | mUmUmCmCmUmG-p-(ps)2-GalNAc4 | | psmUpsmU |
| 614 | 2153 | | | mApsmUpsmGmCfCmUfUfGfGmUmAmUmG | 2193 | mCpsfApsmGmGmAfAmCmAmUmAmCmCmAfAmGfGmCmAmUp |
| | | | | mUmUmCmCmUmG-p-(ps)2-GalNAc4 | | smCpsmC |
| 615 | 2154 | | | mApsmUpsmGmCfCmUfUfGfGmUmAmUmG | 2194 | mApsfApsmGmGmAfAmCmAmUmAmCmCmAfAmGfGmCmAmUp |
| | | | | mUmUmCmCmUmG-p-(ps)2-GalNAc4 | | smCpsmC |
| 616 | 2155 | | | mApsmUpsmGmCmCmUfUmGfGfUfAmUmG | 2195 | mApsfGpsmCmAmGfGmAmAmCmAmUmAmCfCmAfAmGmGmC |
| | | | | mUmUmCmCmUmGmCmU-p-(ps)2-GalNAc4 | | mAmUpsmCpsmC |
| 617 | 2156 | | | mGpsmGpsmAmUmGmCfCmUfUfGfGmUmA | 2196 | mApsfApsmGmGmAfAmCmAmUmAmCmCmAfAmGfGmCmAmU |
| | | | | mUmGmUmUmCmCmUmG-p-(ps)2- | | mCmCpsmApsmC |
| | | | | GalNAc4 | | |
| 618 | 2157 | | | mApsmUpsmGmCfCmUfUfGfAmUmAmUmG | 2197 | vmUpsfApsmGmGmAfAmCmAmUmAmUmCmAfAmGfGmCmAmU |
| | | | | mUmUmCmCmUmG-p-(ps)2-GalNAc4 | | psmUpsmU |
| 619 | 2158 | | | mApsmUpsmGmCfCmUfUfGfGmUmUmUm | 2198 | vmUpsfApsmGmGmAfAmCmAmAmAmCmCmAfAmGfGmCmAmU |
| | | | | GmUmUmCmCmUmG-p-(ps)2-GalNAc4 | | psmUpsmU |
| 620 | 2159 | | | mApsmUpsmGmCfCmUfUfGfGmUmUmUm | 2199 | d2vmApsfApsmGmGmAfAmCmAmAmAmCmCmAfAmGfGmCmA |
| | | | | GmUmUmCmCmUmG-p-(ps)2-GalNAc4 | | mUpsmCpsmC |
| 621 | 2160 | | | mApsmUpsmGmCfCmUfUfGfGmUmAmUmG | 2200 | mCpsfApsmGmGfAmAmCfAmUmAmCmCmAfAmGmGfCmAmUps |
| | | | | mUmUmCmCmUmG- | | mUpsmU |
| | | | | GalNAc4psGalNAc4psGalNAc4 | | |
| 622 | 2161 | | | GalNAc4psGalNAc4psGalNAc4- | 2201 | mCpsfApsmGmGmAfAmCmAmUmAmCmCmAfAmGfGmCmAmUp |
| | | | | mAmUmGmCfCmUfUfGfGmUmAmUmGmU | | smUpsmU |
| | | | | mUmCmCmUmG- | | |
| | | | | GalNAc4psGalNAc4psGalNAc4 | | |
| 623 | 2162 | | | mApsmUpsmGmCfCmUfUfGfGmUmAmUmG | 2202 | mCpsfApsmGmGmAfAmCmAmUmAmCmCmAfAmGfGmCmAmUp |
| | | | | mUmUmCmCmUmG- | | smUpsmU |
| | | | | GalNAc4psGalNAc4psGalNAc4psGalNac4 | | |
| 624 | 2163 | | | mApsmUpsmGmCf2PmUfUfGfGmUmAmUm | 2203 | mCpsfApsmGmGmAfAmCmAmUmAmCmCmAfAmGfGmCmAmUp |
| | | | | GmUmUmCmCmUmG- | | smUpsmU |
| | | | | GalNAc4psGalNAc4psGalNAc4 | | |
| 625 | 2164 | | | mApsmUpsmGmCfCmUfUfGfGmUmAmUmG | 2204 | mCpsfApsmGmGmAfAmCmAmUmAmCmCmAfAmGfGmCmAmUp |
| | | | | mUmUmCmun34CmUmG- | | smUpsmU |
| | | | | GalNAc4psGalNAc4psGalNAc4 | | |
| 626 | 2165 | | | mApsmUpsmGmCfCmUfUfGfGmUmAmUmG | 2205 | d2vmApsfApsmGmGmAfAmCmAmUmAmCmCmAfAmGfGmCmA |
| | | | | mUmUmCmCmUmG- | | mUpsmCpsmC |
| | | | | GalNAc4psGalNAc4psGalNAc4 | | |
| 627 | 2166 | | | mApsmUpsmGmCf2PmUfUfGfGmUmAmUm | 2206 | mApsfApsmGmGmAfAmCmAmUmAmCmCmAfAmGfGmCmAmUp |
| | | | | GmUmUmCmCmUmG- | | smCpsmC |
| | | | | GalNAc4psGalNAc4psGalNAc4 | | |
| 628 | 2167 | | | mApsmUpsmGmCf2PmUfUfGfGmUmAmUm | 2207 | d2vmApsfApsmGmGmAfAmCmAmUmAmCmCmAfAmGfGmCmA |
| | | | | GmUmUmCmCmUmG- | | mUpsmCpsmC |
| | | | | GalNAc4psGalNAc4psGalNAc4 | | |
| 629 | 2168 | | | mApsmUpsmGmCfCmUfUfGfGmUmAmUmG | 2208 | d2vmApsfApsmGmGmAfAmCmAmUmAmCmCmAfAmGfGmCmA |
| | | | | mUmUmCmun34CmUmG-p-(ps)2-GalNAc4 | | mUpsmCpsmC |
| 630 | 2169 | | | GalNAc4-(ps)2-p- | 2209 | mApsfApsmGmGmAfAmCmAmUmAmCmCmAfAmGfGmCmAmUp |
| | | | | mAmUmGmCfCmUfUfGfGmUmAmUmGmU | | smCpsmC |
| | | | | mUmCmCmUmG-p-(ps)2-GalNAc4 | | |
| 631 | 2170 | | | mApsmUpsmGmCfCmUfUfGfGmUmAmUmG | 2210 | c20- |
| | | | | mUmUmCmCmUmG-p-(ps)2-GalNAc4 | | 4hUpsfApsmGmGmAfAmCmAmUmAmCmCmAfAmGfGmCmAmU |
| | | | | | | psmCpsmC |
| 632 | 2171 | | | mGpsmGpsmAmUmGmCfCmUfUfGfGmUmA | 2211 | mApsfApsmGmGmAfAmCmAmUmAmCmCmAfAmGfGmCmAmU |
| | | | | mUmGmUmUmCmCmUmG-p-(ps)2- | | mCmCpsmApsmC |
| | | | | GalNAc4 | | |
| 633 | 2172 | | | mApsmUpsmGmCfCmUfUfGfGmUmUmUm | 2212 | vmApsfApsmGmGmAfAmCmAmAmAmCmCmAfAmGfGmCmAmU |
| | | | | GmUmUmCmCmUmG-p-(ps)2-GalNAc4 | | psmCpsmC |
| 634 | 2173 | | | mGpsmUpsmGmUmCmUfGmAfCfUfUmUmC | 2213 | vmUpsfUpsmUmGmGfAmCmCmGmAmAmAmGfUmCfAmGmAmC |
| | | | | mGmGmUmCmCmAmAmA-p-(ps)2-GalNAc4 | | mAmCpsmUpsmU |
| 635 | 2174 | | | mGpsmUpsmGmUmCmUfGmAfCfUfUmUmC | 2214 | vmUpsfUpsmUmGmGfAmCmCmGmAmAmAmGfUmCfAmGmAmC |
| | | | | mGmGmUmCmCmAmAmA-p-(ps)2-GalNAc4 | | mAmCpsmCpsmA |
| 636 | 2175 | | | mGpsmUpsmGmUmCmUfGmAfCfUfUmUmC | 2215 | vmApsfUpsmUmGmGfAmCmCmGmAmAmAmGfUmCfAmGmAmC |
| | | | | mGmGmUmCmCmAmAmA-p-(ps)2-GalNAc4 | | mAmCpsmCpsmA |
| 637 | 2176 | | | mGpsmUpsmGmUmCmUfGmAfCfUfUmUmC | 2216 | mApsfUpsmUmGmGfAmCmCmGmAmAmAmGfUmCfAmGmAmC |
| | | | | mGmGmUmCmCmAmAmA-p-(ps)2-GalNAc4 | | mAmCpsmCpsmA |
| 638 | 2177 | | | mUpsmCpsmCmAmAmAfGmAfCfGfAmAmG | 2217 | vmApsfUpsmCmCmAfCmGmAmCmUmUmCmGfUmCfUmUmUmG |
| | | | | mUmCmGmUmGmGmAmU-p-(ps)2- | | mGmApsmCpsmC |
| | | | | GalNAc4 | | |
| 639 | 2178 | | | mUpsmCpsmCmAmAmAfGmAfCfGfAmAmG | 2218 | vmUpsfUpsmCmCmAfCmGmAmCmUmUmCmGfUmCfUmUmUm |
| | | | | mUmCmGmUmGmGmAmU-p-(ps)2- | | GmGmApsmCpsmC |
| | | | | GalNAc4 | | |
| 640 | 2179 | | | mUpsmCpsmCmAmAmAfGmAfCfGfAmAmG | 2219 | mUpsfUpsmCmCmAfCmGmAmCmUmUmCmGfUmCfUmUmUmG |
| | | | | mUmCmGmUmGmGmAmU-p-(ps)2- | | mGmApsmCpsmC |
| | | | | GalNAc4 | | |
| 641 | 2180 | | | mApsmUpsmGmCmCmAfAmAfAfCfAmAmC | 2220 | vmApsfGpsmGmUmGfAmUmGmGmUmUmGmUfUmUfUmGmG |
| | | | | mCmAmUmCmAmCmCmG-p-(ps)2-GalNAc4 | | mCmAmUpsmUpsmU |
| 642 | 2181 | | | mApsmUpsmGmCmCmAfAmAfAfCfAmAmC | 2221 | vmApsfGpsmGmUmGfAmUmGmGmUmUmGmUfUmUfUmGmG |
| | | | | mCmAmUmCmAmCmCmG-p-(ps)2-GalNAc4 | | mCmAmUpsmCpsmA |
| 643 | 2182 | | | mApsmUpsmGmCmCmAfAmAfAfCfAmAmC | 2222 | mApsfGpsmGmUmGfAmUmGmGmUmUmGmUfUmUfUmGmGm |
| | | | | mCmAmUmCmAmCmCmG-p-(ps)2-GalNAc4 | | CmAmUpsmCpsmA |
| 644 | 2183 | | | mGpsmApsmAmGmUmCfGmUfGfGfAmUmG | 2223 | vmUpsfApsmCmCmAfAmGmGmCmAmUmCmCfAmCfGmAmCmU |
| | | | | mCmCmUmUmGmGmUmA-p-(ps)2-GalNAc4 | | mUmCpsmGpsmU |
| 645 | 2184 | | | mGpsmApsmAmGmUmCfGmUfGfGfAmUmG | 2224 | vmApsfApsmCmCmAfAmGmGmCmAmUmCmCfAmCfGmAmCmU |
| | | | | mCmCmUmUmGmGmUmA-p-(ps)2-GalNAc4 | | mUmCpsmGpsmU |
| 646 | 2185 | | | mGpsmApsmAmGmUmCfGmUfGfGfAmUmG | 2225 | mApsfApsmCmCmAfAmGmGmCmAmUmCmCfAmCfGmAmCmUm |
| | | | | mCmCmUmUmGmGmUmA-p-(ps)2-GalNAc4 | | UmCpsmGpsmU |
| 647 | 2186 | | | mUpsmCpsmGmUmGmGfAmUfGfCfCmUmU | 2226 | mApsfApsmCmAmUfAmCmCmAmAmGmGmCfAmUfCmCmAmCm |
| | | | | mGmGmUmAmUmGmUmU-p-(ps)2- | | GmApsmCpsmU |
| | | | | GalNAc4 | | |
| 648 | 2187 | | | mApsmGpsmUmCmGmUfGmGfAfUfGmCmC | 2227 | mApsfApsmUmAmCfCmAmAmGmGmCmAmUfCmCfAmCmGmA |
| | | | | mUmUmGmGmUmAmUmG-p-(ps)2- | | mCmUpsmUpsmC |
| | | | | GalNAc4 | | |
| 649 | 2278 | | | mUpsmCpsmCmAmAmAfGmAfCfGfAmAmG | 2302 | mApsfUpsmCmCmAfCmGmAmCmUmUmCmGfUmCfUmUmUmG |
| | | | | mUmCmGmUmGmGmAmU-p-(ps)2- | | mGmApsmUpsmU |
| | | | | GalNAc4 | | |
| 650 | 2279 | | | mApsmUpsmGmCmCmAfAmAfAf2PfAmAmC | 2303 | vmApsfGpsmGmUmGfAmUmGmGmUmUmGmUfUmUfUmGmG |
| | | | | mCmAmUmCmAmCmCmG-p-(ps)2-GalNAc4 | | mCmAmUpsmCpsmA |
| 651 | 2280 | | | mApsmUpsmGmCmCmAfAmAfAfCfAmAmC | 2304 | vmApsfGpsmGmUmGfAmUmGmGmUmUmGmUfUmUfUmGmG |
| | | | | mCmAmUmCmAmun34CmCmG-p-(ps)2- | | mCmAmUpsmCpsmA |
| | | | | GalNAc4 | | |
| 652 | 2281 | | | mApsmUpsmGmCmCmAfAmAfAfCfAmAmC | 2305 | vmApsfGpsmGmUmGfAmUmGmGmUmUmGmUfUmUfUmGmG |
| | | | | mCmAmUmCmAmCmCmU-p-(ps)2-GalNAc4 | | mCmAmUpsmCpsmA |
| 653 | 2282 | | | mApsmUpsmGmCmCmAfAmAfAf2PfAmAmC | 2306 | vmApsfGpsmGmUmGfAmUmGmGmUmUmGmUfUmUfUmGmG |
| | | | | mCmAmUmCmAmCmCmU-p-(ps)2-GalNAc4 | | mCmAmUpsmCpsmA |
| 654 | 2283 | | | mGpsmApsmAmGmUmCfGmUfGfGfAmUmG | 2307 | c20- |
| | | | | mCmCmUmUmGmGmUmA-p-(ps)2-GalNAc4 | | 4hUpsfApsmCmCmAfAmGmGmCmAmUmCmCfAmCfGmAmCmU |
| | | | | | | mUmCpsmGpsmU |
| 655 | 2284 | | | mGpsmApsmAmGmUmCfGmUfGfGfAmUmG | 2308 | vmApsfApsmCmCmAfAunGmGmCmAmUmCmCfAmCfGmAmCmU |
| | | | | mCmCmUmUmGmGmUmA-p-(ps)2-GalNAc4 | | mUmCpsmGpsmU |
| 656 | 2285 | | | mGpsmApsmAmGmUmCfGmUfGfGfAmUmG | 2309 | vmApsfApsmCmCmAfAmGmGmCmAmUmCmCfAmCfGmAmCmU |
| | | | | mCmCmUmUmGmGmUmU-p-(ps)2- | | mUmCpsmGpsmU |
| | | | | GalNAc4 | | |
| 657 | 2286 | | | mGpsmApsmAmGmUmCfGmUfGfGfCmUmG | 2310 | vmApsfApsmCmCmAfAmGmGmCmAmUmCmCfAmCfGmAmCmU |
| | | | | mCmCmUmUmGmGmUmA-p-(ps)2-GalNAc4 | | mUmCpsmGpsmU |
| 658 | 2287 | | | mGpsmApsmAmGmUmCfGmUfGfGfAmUmG | 2311 | vmApsfApsmCmCmAfAmGmGmCmAmUmCmCfAmCfGmAmCmU |
| | | | | mCmCmUmUmGmun34GmUmA-p-(ps)2- | | mUmCpsmGpsmU |
| | | | | GalNAc4 | | |
| 659 | 2288 | | | mGpsmApsmAmGmUmCfGmUfGfGfAmUmG | 2312 | mApsfApsmCmCmAfAmGmGmCmAmUmCmCfAmCfGmAmCmUm |
| | | | | mCmCmUmUmGmGmUmU-p-(ps)2- | | UmCpsmGpsmU |
| | | | | GalNAc4 | | |
| 660 | 2289 | | | mGpsmApsmAmGmUmCfGmUfGfGfCmUmG | 2313 | mApsfApsmCmCmAfAmGmGmCmAmUmCmCfAmCfGmAmCmUm |
| | | | | mCmCmUmUmGmGmUmA-p-(ps)2-GalNAc4 | | UmCpsmGpsmU |
| 661 | 2290 | | | mGpsmApsmAmGmUmCfGmUfGfGfAmUmG | 2314 | mApsfApsmCmCmAfAmGmGmCmAmUmCmCfAmCfGmAmCmUm |
| | | | | mCmCmUmUmGmun34GmUmA-p-(ps)2- | | UmCpsmGpsmU |
| | | | | GalNAc4 | | |
| 662 | 2291 | | | mGpsmUpsmCmGmUmGfGmAfUfGfCmCmU | 2315 | vmApsfCpsmAmUmAfCmCmAmAmGmGmCmAfUmCfCmAmCmG |
| | | | | mUmGmGmUmAmUmGmU-p-(ps)2- | | mAmCpsmUpsmU |
| | | | | GalNAc4 | | |
| 663 | 2186 | | | mUpsmCpsmGmUmGmGfAmUfGfCfCmUmU | 2024 | mApsfApsmCmAmUfAmCmCmAmAmGmGmCfAmUfCmCmAmCm |
| | | | | mGmGmUmAmUmGmUmU-p-(ps)2- | | GmApsmUpsmU |
| | | | | GalNAc4 | | |
| 664 | 2292 | | | mUpsmCpsmGmUmGmGfAmUfGfCfCmUmU | 2316 | vmApsfApsmCmAmUfAmCmCmAmAmGmGmCfAmUfCmCmAmC |
| | | | | mGmGmUmAmUmGmUmU-p-(ps)2- | | mGmApsmUpsmU |
| | | | | GalNAc4 | | |
| 665 | 2293 | | | mApsmUpsmGmGfAmGfGfAfGmUmGmAm | 2317 | mUpsfUpsmGmUmCfAmCmUmCmAmCmUmCfCmUfCmCmAmUp |
| | | | | GmUmGmAmCmAmA-p-(ps)2-GalNAc4 | | smUpsmU |
| 666 | 2294 | | | mApsmUpsmGmCmCmAfAmAfAfCfAmAmC | 2318 | mCpsfGpsmGmUmGfAmUmGmGmUmUmGmUfUmUfUmGmGm |
| | | | | mCmAmUmCmAmCmCmG-p-(ps)2-GalNAc4 | | CmAmUpsmUpsmU |
| 667 | 2295 | | | mGpsmApsmAmGfUmCmGmUfGfGfAmUmG | 2319 | mUpsfApsmCmCmAmAmGmGmCmAmUmCmCfAmCmGmAmCm |
| | | | | fCmCmUmUmGfGmUmA-p-(ps)2-GalNAc4 | | UmUmCpsmUpsmU |
| 668 | 2296 | | | mGpsmApsmAmGfUmCmGmUfGfGfAmUmG | 2320 | vmUpsfApsmCmCmAmAmGmGmCmAmUmCmCfAmCmGmAmC |
| | | | | fCmCmUmUmGfGmUmA-p-(ps)2-GalINAc4 | | mUmUmCpsmUpsmU |
| 669 | 2297 | | | mGpsmUpsmGmUmCmUfGmAfCfUfUmUmC | 2321 | mUpsfUpsmUmGmGfAmCmCmGmAmAmAmGfUmCfAmGmAmC |
| | | | | mGmGmUmCmCmAmAmA-p-(ps)2-GalNAc4 | | mAmCpsmUpsmU |
| 670 | 2298 | | | mUpsmCpsmCmAmAmAfGmAfCfGfAmAmG | 2322 | vmApsfUpsmCmCmAfCmGmAmCmUmUmCmGfUmCfUmUmUmG |
| | | | | mUmCmGmUmGmGmAmU-p-(ps)2- | | mGmApsmUpsmU |
| | | | | GalNAc4 | | |
| 671 | 2299 | | | mGpsmUpsmCmGmUmGfGmAfUfGfCmCmU | 2323 | mApsfCpsmAmUmAfCmCmAmAmGmGmCmAfUmCfCmAmCmGm |
| | | | | mUmGmGmUmAmUmGmU-p-(ps)2- | | AmCpsmUpsmU |
| | | | | GalNAc4 | | |
| 672 | 2300 | | | mApsmUpsmGmCmCmAfAmAfAfCfAmAmC | 2324 | vmCpsfGpsmGmUmGfAmUmGmGmUmUmGmUfUmUfUmGmGm |
| | | | | mCmAmUmCmAmCmCmG-p-(ps)2-GalNAc4 | | CmAmUpsmUpsmU |
| 673 | 2301 | | | mGpsmApsmAmGmUmCfGmUfGfGfAmUmG | 2325 | vmUpsfApsmCmCmAfAmGmGmCmAmUmCmCfAmCfGmAmCmU |
| | | | | mCmCmUmUmGmGmUmA-p-(ps)2-GalNAc4 | | mUmCpsmUpsmU |
| 674 | 2326 | | | mApsmCpsmAmUfCmUfGfCfCmCmUmAmA | 2340 | mUpsfUpsmGmAmCfUmUmUmAmGmGmGmCfAmGfAmUmGmU |
| | | | | mAmGmUmCmAmA-p-(ps)2-GalNAc4 | | psmCpsmG |
| 675 | 2327 | | | mApsmCpsmAmUfCmUfGfCfCmCmUmAmA | 2341 | vmUpsfUpsmGmAmCfUmUmUmAmGmGmGmCfAmGfAmUmGm |
| | | | | mAmGmUmCmAmA-p-(ps)2-GalNAc4 | | UpsmCpsmG |
| 676 | 2328 | | | mApsmCpsmAmUfCmUfGfCfCmCmUmAmA | 2342 | mApsfUpsmGmAmCfUmUmUmAmGmGmGmCfAmGfAmUmGmU |
| | | | | mAmGmUmCmAmA-p-(ps)2-GalNAc4 | | psmCpsmG |
| 677 | 2329 | | | mApsmCpsmAmUfCmUfGfCfCmCmUmAmA | 2343 | vmApsfUpsmGmAmCfUmUmUmAmGmGmGmCfAmGfAmUmGm |
| | | | | mAmGmUmCmAmA-p-(ps)2-GalNAc4 | | UpsmCpsmG |
| 678 | 2330 | | | mApsmCpsmAmUf2PmUfGfCfCmCmUmAm | 2344 | mUpsfUpsmGmAmCfUmUmUmAmGmGmGmCfAmGfAmUmGmU |
| | | | | AmAmGmUmCmAmA-p-(ps)2-GalNAc4 | | psmCpsmG |
| 679 | 2331 | | | mApsmCpsmAmUf2PmUfGfCfCmCmUmAm | 2345 | vmUpsfUpsmGmAmCfUmUmUmAmGmGmGmCfAmGfAmUmGm |
| | | | | AmAmGmUmCmAmA-p-(ps)2-GalNAc4 | | UpsmCpsmG |
| 680 | 2332 | | | mApsmCpsmAmUfCmUfGfCf2PmCmUmAm | 2346 | mUpsfUpsmGmAmCfUmUmUmAmGmGmGmCfAmGfAmUmGmU |
| | | | | AmAmGmUmCmAmA-p-(ps)2-GalNAc4 | | psmCpsmG |
| 681 | 2333 | | | mApsmCpsmAmUfCmUfGfCf2PmCmUmAm | 2347 | vmUpsfUpsmGmAmCfUmUmUmAmGmGmGmCfAmGfAmUmGm |
| | | | | AmAmGmUmCmAmA-p-(ps)2-GalNAc4 | | UpsmCpsmG |
| 682 | 2334 | | | mGpsmCpsmCmUfGmUfGfGfAmAmUmCmU | 2348 | mApsfApsmUmGmGfCmAmGmAmUmUmCmCfAmCfAmGmGmCp |
| | | | | mGmCmCmAmUmU-p-(ps)2-GalNAc4 | | smApsmG |
| 683 | 2335 | | | mGpsmCpsmCmUfGmUfGfGfAmAmUmCmU | 2349 | vmApsfApsmUmGmGfCmAmGmAmUmUmCmCfAmCfAmGmGmC |
| | | | | mGmCmCmAmUmU-p-(ps)2-GalNAc4 | | psmApsmG |
| 684 | 2336 | | | mGpsmCpsmCmUfGmUfGfGfAmAmUmCmU | 2350 | mUpsfApsmUmGmGfCmAmGmAmUmUmCmCfAmCfAmGmGmC |
| | | | | mGmCmCmAmUmU-p-(ps)2-GalNAc4 | | psmApsmG |
| 685 | 2337 | | | mGpsmCpsmCmUfGmUfGfGfAmAmUmCmU | 2351 | vmUpsfApsmUmGmGfCmAmGmAmUmUmCmCfAmCfAmGmGmC |
| | | | | mGmCmCmAmUmU-p-(ps)2-GalNAc4 | | psmApsmG |
| 686 | 2338 | | | mUpsmApsmCmCmAmGfAmGfUfGfUmCmU | 2352 | vmUpsfCpsmCmCmCfAmUmCmAmGmAmCmAfCmUfCmUmGmG |
| | | | | mGmAmUmGmGmGmGmA-p-(ps)2- | | mUmApsmApsmG |
| | | | | GalNAc4 | | |
| 687 | 2339 | | | mCpsmGpsmAmCmAmUfCmUfGfCfCmCmU | 2353 | vmUpsfUpsmGmAmCfUmUmUmAmGmGmGmCfAmGfAmUmGm |
| | | | | mAmAmAmGmUmCmAmA-p-(ps)2-GalNAc4 | | UmCmGpsmUpsmA |

### Example 60: In Vitro Assay of siRNA Activity

[0605] This example provides exemplary methods for determining the in vitro activity and possible cytotoxic effects of a subset of the siRNAs listed in Table 2. For example, the in vitro activity of the siRNAs may be determined by a luciferase reporter assay and/or a differential gene expression assay, which are described in greater detail below. Specifically, for example, the efficacy of each of the tested siRNA molecules in reducing (or downregulating) the expression of PNPLA3 in vitro was accessed. Each siRNA molecule tested consisted of a 19-mer or 21-mer duplex of two siRNA strands, the sense strand and the antisense strand, corresponding to certain siRNA Duplex ID Nos. in Table 2 above.

### Luciferase Reporter Assay in COS-7 Cells

Cell Culture, Plasmid Transfection, and siRNA Treatment

[0606] In the psiCHECK™-2 reporter plasmid, Renilla luciferase is used as the primary reporter gene with the PNPLA3 rs738409[G] gene (NM_025225.3:c.444C>G) (SEQ ID NO: 2067) cloned downstream of its translational stop codon. A second reporter gene, firefly luciferase, is also expressed and used as a transfection control.

[0607] COS-7 cells (ATCC, CRL-1651) were routinely cultured in Dulbecco's Modified Eagle's Medium (DMEM; Corning, 10-013-CM) supplemented with 10% fetal bovine serum (FBS; Gibco, 16000-044) and 1% Penicillin-Streptomycin (P/S; Corning, 30-002-CI) at 37° C. and 5% CO₂ until 80-90% confluency. Cells were then detached with 0.05% trypsin (Corning, 25-052-CV), resuspended in fresh DMEM, and seeded into 96-well microplates. Cells were transfected using Lipofectamine 3000 (Invitrogen, L30000001) with the psiCHECK™-2 reporter plasmid (Promega, C8021). The cells were then transfected with either 50 nM, 5 nM, or 0.5 nM of a siRNA duplex molecule using Lipofectamine RNAiMAX (Invitrogen, 13778100). A mock transfection control, which consisted of transfecting 1×phosphate-buffered saline, was included.

### Luciferase Reporter Activity

[0608] After about 72 hours of siRNA treatment, the Dual-Glo® Luciferase Assay System (Promega, E2940) was used according to the manufacturer's protocol to quantify firefly and Renilla luciferase activity. All luminescence was measured on an EnVision plate reader (Perkin Elmer). The Renilla:firefly luminescence ratio is calculated for each well. The ratios of siPNPLA3 wells are then normalized to ratios of the mock wells and percent inhibition was calculated.

[0609] Additionally, CellTiter-Glo© Luminescent Cell Viability Assays were also performed with similarly treated COS-7 cells to assess cytotoxic effects. Assays were performed according to the manufacturer's protocol and luminescence was measured on an EnVision plate reader. The luminescence from siRNA-treated wells were then normalized to luminescence of mock wells and percentage viability was calculated.

[0610] The results of the luciferase reporter assay and CellTiter-Glo viability assay in COS-7 cells are provided in Table 3 below.

TABLE 3
Luciferase Reporter Assay and CellTiter-
Glo Viability Assay in COS-7 Cells

| | Luciferase reporter assay | | | | | |
|---|---|---|---|---|---|---|
| siRNA ID | in COS-7 % inhibition | | | CellTiter-Glo in COS-7 | | |
| No. | of reporter activity | | | % viability | | |
| (MDx) | 50 nM | 5 nM | 0.5 nM | 50 nM | 5 nM | 0.5 nM |
| 1 | 0.43 | 12.52 | 8.02 | 97.03 | 101.10 | 98.22 |
| 2 | 7.63 | 5.29 | 12.29 | 90.34 | 99.17 | 96.78 |
| 3 | 17.21 | 9.25 | 0.86 | 98.03 | 96.75 | 102.97 |
| 4 | 3.40 | 10.47 | 1.69 | 104.87 | 96.99 | 104.42 |
| 5 | 9.28 | 8.17 | −2.77 | 98.61 | 99.76 | 96.98 |
| 6 | 14.38 | 4.52 | 2.75 | 103.59 | 102.78 | 105.46 |
| 7 | 7.67 | −4.43 | −7.86 | 101.67 | 99.44 | 101.49 |
| 8 | 5.23 | −10.87 | −9.26 | 99.59 | 96.29 | 103.56 |
| 9 | 22.29 | 14.11 | 8.85 | 102.46 | 107.79 | 109.56 |
| 10 | 0.86 | 6.60 | 9.27 | 108.25 | 113.71 | 102.61 |
| 11 | −5.83 | −2.62 | 7.43 | 101.33 | 103.80 | 102.97 |
| 12 | 21.98 | 12.86 | −13.63 | 106.31 | 105.53 | 101.76 |
| 13 | 29.53 | 29.93 | −4.18 | 103.58 | 104.17 | 109.45 |
| 14 | 53.43 | 49.35 | 4.46 | 94.87 | 103.77 | 102.00 |
| 15 | 29.27 | 23.53 | −0.77 | 107.28 | 106.11 | 103.86 |
| 16 | 29.58 | 27.61 | −2.23 | 104.39 | 106.40 | 103.88 |
| 17 | 5.28 | 8.68 | −21.74 | 105.58 | 100.80 | 105.39 |
| 18 | 42.35 | 34.03 | 8.24 | 115.85 | 109.57 | 104.21 |
| 19 | −10.08 | −13.46 | −3.66 | 99.23 | 101.11 | 94.47 |
| 20 | 18.43 | 18.99 | −3.85 | 90.25 | 102.20 | 102.98 |
| 21 | −15.56 | −25.66 | −29.75 | 97.58 | 101.05 | 94.21 |
| 22 | 19.79 | 25.20 | −0.17 | 100.31 | 100.83 | 96.00 |
| 23 | 21.67 | 5.38 | −3.78 | 99.90 | 104.61 | 96.50 |
| 24 | 5.71 | 14.67 | −2.70 | 105.02 | 102.73 | 109.65 |
| 25 | −12.98 | −8.70 | −5.60 | 103.00 | 100.81 | 104.16 |
| 26 | −18.55 | −10.07 | −14.57 | 105.05 | 98.13 | 109.31 |
| 27 | −12.18 | 4.53 | −5.38 | 100.92 | 102.88 | 108.52 |
| 28 | −12.59 | 12.10 | 5.70 | 98.87 | 99.39 | 97.51 |
| 29 | 6.58 | 1.86 | 9.72 | 105.01 | 102.36 | 98.33 |
| 30 | 5.17 | 3.35 | −7.51 | 104.85 | 102.71 | 99.25 |
| 31 | −0.66 | 3.24 | −6.74 | 100.04 | 102.95 | 99.07 |
| 32 | −7.11 | −7.52 | −7.59 | 101.29 | 100.03 | 101.68 |
| 33 | 14.17 | 17.68 | 8.53 | 100.36 | 103.04 | 98.21 |
| 34 | 2.81 | 6.64 | 9.12 | 97.60 | 100.21 | 99.83 |
| 35 | 5.17 | 9.17 | −1.13 | 97.89 | 101.16 | 97.09 |
| 36 | 12.72 | 18.81 | 18.14 | 99.49 | 100.62 | 103.86 |
| 37 | 6.34 | −22.97 | −4.01 | 93.51 | 96.88 | 95.46 |
| 38 | 4.96 | −40.97 | −13.92 | 96.14 | 92.72 | 93.71 |
| 39 | −7.20 | −9.11 | −25.14 | 96.68 | 96.49 | 96.59 |
| 40 | −5.30 | 13.33 | −4.20 | 96.42 | 95.66 | 98.94 |
| 41 | 6.32 | −3.27 | −11.22 | 96.98 | 94.81 | 97.72 |
| 42 | −2.73 | 2.34 | −6.01 | 99.34 | 98.05 | 96.56 |
| 43 | 4.64 | 10.30 | −7.59 | 94.41 | 94.17 | 96.36 |
| 44 | 3.22 | 10.31 | −0.07 | 98.21 | 95.43 | 99.38 |
| 45 | −10.11 | 10.11 | −2.65 | 100.53 | 101.25 | 100.78 |
| 46 | −3.32 | 6.18 | −15.76 | 96.01 | 94.42 | 100.54 |
| 47 | 9.37 | 10.77 | −3.48 | 94.89 | 97.14 | 94.13 |
| 48 | 2.57 | −8.48 | −20.16 | 96.19 | 96.86 | 101.26 |
| 49 | 0.17 | 3.68 | −4.29 | 97.82 | 98.20 | 95.54 |
| 50 | −0.54 | 12.19 | −4.37 | 100.57 | 94.02 | 95.14 |
| 51 | 17.18 | 16.45 | 3.29 | 96.25 | 96.30 | 98.27 |
| 52 | −2.81 | −2.17 | −3.46 | 99.64 | 94.26 | 96.67 |
| 53 | −1.20 | 1.40 | −2.86 | 104.44 | 94.65 | 91.65 |
| 54 | 14.92 | 7.10 | −1.56 | 101.99 | 98.46 | 99.24 |
| 55 | 6.97 | 11.45 | 3.34 | 98.27 | 102.09 | 100.38 |
| 56 | −9.50 | 12.33 | 2.51 | 100.08 | 97.78 | 99.31 |
| 57 | 7.68 | −0.32 | −2.53 | 95.06 | 101.76 | 100.68 |
| 58 | −2.50 | −14.43 | −4.44 | 103.71 | 105.13 | 101.11 |
| 59 | 5.07 | −5.88 | −8.51 | 101.95 | 104.15 | 100.15 |
| 60 | −0.68 | 0.45 | −1.50 | 100.53 | 106.99 | 101.34 |
| 61 | −2.62 | 5.58 | −3.80 | 100.10 | 102.51 | 97.71 |
| 62 | 10.73 | 3.60 | 1.45 | 98.91 | 100.72 | 99.30 |
| 63 | 36.37 | 31.94 | 3.55 | 96.30 | 103.51 | 98.75 |
| 64 | 19.78 | 18.08 | 4.72 | 91.19 | 95.25 | 94.81 |
| 65 | −3.62 | 13.54 | 4.24 | 96.16 | 93.63 | 94.95 |
| 66 | 40.71 | 30.72 | 0.95 | 96.22 | 96.60 | 93.00 |
| 67 | 11.52 | 2.03 | −10.57 | 96.24 | 98.16 | 92.48 |
| 68 | 41.47 | 30.22 | 3.94 | 96.42 | 98.12 | 97.32 |
| 69 | 22.57 | 18.99 | −5.26 | 96.77 | 97.19 | 95.04 |
| 70 | 45.39 | 26.33 | 0.46 | 97.87 | 98.27 | 95.04 |
| 71 | 31.86 | 35.78 | −0.17 | 98.25 | 96.56 | 94.46 |
| 72 | −0.52 | −3.48 | −17.64 | 96.33 | 99.39 | 100.97 |
| 73 | 10.93 | 12.96 | 17.35 | 103.58 | 122.28 | 101.90 |
| 74 | 38.48 | 32.25 | 11.66 | 105.50 | 113.90 | 97.40 |
| 75 | 37.72 | 26.60 | 6.29 | 107.30 | 117.53 | 94.58 |
| 76 | 25.94 | 15.17 | 10.79 | 103.87 | 110.01 | 101.92 |
| 77 | 37.18 | 23.01 | 17.27 | 101.73 | 103.78 | 112.03 |
| 78 | 22.02 | 23.44 | −0.22 | 90.92 | 109.41 | 92.02 |
| 79 | 35.58 | 26.26 | 24.10 | 83.15 | 106.84 | 92.82 |
| 80 | 23.15 | 12.46 | −0.12 | 86.89 | 111.44 | 87.72 |
| 81 | 41.54 | 19.27 | −11.96 | 89.40 | 100.08 | 92.58 |
| 82 | 30.54 | 11.55 | 2.43 | 129.50 | 125.11 | 116.66 |
| 83 | 33.76 | 11.55 | −16.68 | 115.34 | 129.88 | 102.39 |
| 84 | 25.24 | 21.18 | −18.32 | 116.90 | 116.04 | 98.56 |
| 85 | 27.36 | 29.39 | −26.51 | 101.77 | 117.36 | 100.53 |
| 86 | 25.69 | 14.35 | −29.99 | 87.95 | 110.86 | 131.35 |
| 87 | 18.64 | 16.38 | −26.78 | 93.46 | 86.54 | 128.67 |
| 88 | 43.20 | 20.67 | −0.67 | 77.03 | 92.96 | 117.07 |
| 89 | 17.07 | 16.81 | −9.67 | 100.22 | 108.68 | 112.51 |
| 90 | 40.55 | 26.27 | −7.31 | 77.42 | 99.33 | 112.08 |
| 91 | 40.04 | 45.54 | 23.02 | 103.60 | 111.24 | 119.24 |
| 92 | 31.06 | 40.38 | 22.75 | 108.91 | 112.75 | 113.75 |
| 93 | 45.34 | 51.19 | 24.30 | 100.50 | 105.73 | 104.57 |
| 94 | 41.69 | 28.65 | 20.82 | 97.95 | 81.20 | 99.36 |
| 95 | 50.36 | 50.47 | 18.89 | 105.24 | 83.74 | 86.54 |
| 96 | 57.17 | 42.37 | 20.05 | 91.95 | 76.88 | 79.52 |
| 97 | 40.26 | 28.72 | 4.57 | 87.77 | 86.96 | 93.42 |
| 98 | 57.27 | 46.03 | 22.54 | 84.63 | 90.32 | 97.17 |
| 99 | 51.27 | 43.51 | 17.90 | 90.61 | 98.14 | 107.90 |
| 100 | 45.21 | 47.67 | 21.58 | 111.01 | 108.36 | 109.82 |
| 101 | 37.93 | 30.64 | 26.92 | 109.70 | 93.51 | 110.01 |
| 102 | 50.27 | 46.47 | 31.49 | 117.58 | 101.35 | 116.44 |
| 103 | 40.84 | 37.28 | 13.81 | 97.71 | 107.57 | 112.60 |
| 104 | 60.15 | 47.21 | 18.00 | 113.24 | 101.53 | 119.28 |
| 105 | 57.09 | 40.55 | 26.61 | 110.20 | 111.53 | 118.37 |
| 106 | 66.20 | 55.15 | 27.53 | 106.54 | 98.13 | 118.24 |
| 107 | 65.89 | 51.41 | 32.81 | 110.86 | 116.91 | 108.67 |
| 108 | 51.36 | 52.20 | 11.19 | 106.74 | 99.18 | 110.05 |
| 109 | 60.40 | 54.44 | 24.94 | 103.70 | — | — |
| 110 | 38.23 | 28.87 | 0.75 | 103.14 | — | — |
| 111 | 15.24 | 12.25 | −1.66 | 107.56 | — | — |
| 112 | 60.94 | 59.26 | 23.39 | 104.59 | — | — |
| 113 | 39.34 | 37.62 | 9.30 | 108.62 | — | — |
| 114 | 30.16 | 31.55 | 3.44 | 105.98 | — | — |
| 115 | 49.85 | 42.32 | 12.79 | 100.04 | — | — |
| 116 | 49.72 | 50.73 | −3.51 | 93.84 | — | — |
| 117 | 35.57 | 27.40 | 6.94 | 104.45 | — | — |
| 118 | 44.04 | 43.02 | 20.85 | 102.27 | — | — |
| 119 | 55.26 | 56.81 | 16.27 | 90.32 | — | — |
| 120 | 20.98 | 23.16 | −0.21 | 98.91 | — | — |
| 121 | 68.22 | 67.49 | 42.00 | 97.32 | — | — |
| 122 | 50.00 | 41.37 | 6.89 | 102.44 | — | — |
| 123 | 39.23 | 38.14 | 5.10 | 103.50 | — | — |
| 124 | 73.58 | 69.20 | 23.53 | 101.17 | — | — |
| 125 | 44.45 | 35.69 | −8.51 | 93.53 | — | — |
| 126 | 31.09 | 30.88 | −7.55 | 101.28 | — | — |
| 127 | 10.93 | 11.39 | 10.79 | 100.25 | — | — |
| 128 | 25.17 | 32.19 | 14.86 | 99.77 | — | — |
| 129 | 29.33 | 22.99 | 0.61 | 100.75 | — | — |
| 130 | −0.73 | 19.30 | 11.71 | 95.68 | — | — |
| 131 | 20.11 | 14.50 | 1.67 | 100.61 | — | — |
| 132 | 22.95 | 10.15 | 5.53 | 102.59 | — | — |
| 133 | 37.57 | 20.43 | 2.55 | 103.12 | — | — |
| 134 | 16.29 | 2.33 | −12.67 | 100.21 | — | — |
| 135 | 35.47 | 20.60 | 6.02 | 99.74 | — | — |
| 136 | 25.77 | 17.38 | 4.47 | 100.91 | — | — |
| 137 | 20.45 | 13.54 | −6.69 | 106.87 | — | — |
| 138 | 40.96 | 25.39 | 1.99 | 104.23 | — | — |
| 139 | 22.31 | 8.31 | −0.69 | 98.82 | — | — |
| 140 | 8.15 | 10.62 | −3.53 | 106.20 | — | — |
| 141 | 58.95 | 56.34 | 20.90 | 102.54 | — | — |
| 142 | 59.19 | 58.25 | 11.58 | 112.00 | — | — |
| 143 | 61.64 | 53.55 | 3.43 | 108.92 | — | — |
| 144 | 42.55 | 29.39 | 4.42 | 104.60 | — | — |
| 145 | 28.74 | 24.39 | 13.22 | 90.32 | 96.97 | 96.45 |
| 146 | 39.27 | 40.83 | 14.56 | 91.13 | 100.64 | 102.93 |
| 147 | 43.55 | 47.77 | 28.66 | 98.77 | 103.52 | 100.95 |
| 148 | 12.45 | 20.01 | 9.30 | 97.25 | 102.76 | 102.06 |
| 149 | 53.38 | 25.42 | −0.13 | 97.28 | 102.59 | 104.59 |
| 150 | 53.51 | 57.75 | 26.50 | 96.49 | 103.51 | 103.85 |
| 151 | 9.94 | 9.01 | 6.02 | 95.50 | 103.24 | 103.18 |
| 152 | −9.62 | −1.24 | −1.37 | 98.49 | 104.17 | 103.38 |
| 153 | 9.77 | 16.33 | 3.08 | 96.34 | 101.30 | 105.22 |
| 154 | −5.26 | −3.21 | 5.74 | 99.77 | 104.06 | 97.77 |
| 155 | −7.72 | 3.55 | 7.01 | 94.44 | 98.33 | 97.78 |
| 156 | −13.36 | −10.16 | −3.65 | 97.83 | 97.94 | 100.17 |
| 157 | 21.66 | 16.08 | 10.06 | 97.51 | 99.76 | 105.20 |
| 158 | −2.64 | 1.40 | −4.71 | 101.01 | 100.76 | 104.79 |
| 159 | 7.65 | 5.54 | −6.29 | 101.47 | 103.96 | 102.77 |
| 160 | 3.74 | 1.31 | 3.04 | 104.10 | 103.93 | 103.82 |
| 161 | 5.27 | −7.43 | 3.75 | 93.68 | 105.41 | 105.87 |
| 162 | −4.85 | 14.55 | 12.57 | 96.56 | 102.35 | 107.58 |
| 163 | 3.64 | −1.01 | 6.69 | 96.47 | 105.02 | 96.58 |
| 164 | 19.94 | 14.29 | −20.90 | 97.26 | 103.66 | 98.77 |
| 165 | −2.94 | 8.01 | −6.85 | 100.48 | 100.25 | 103.26 |
| 166 | 13.07 | 8.27 | 8.56 | 97.24 | 101.95 | 107.44 |
| 167 | −11.94 | −10.11 | −1.99 | 98.73 | 108.28 | 109.80 |
| 168 | 40.04 | 33.48 | 21.62 | 99.91 | 101.93 | 109.26 |
| 169 | 2.60 | 10.99 | 18.78 | 101.59 | 100.08 | 106.07 |
| 170 | 31.14 | 38.50 | 11.08 | 99.03 | 100.77 | 106.39 |
| 171 | 48.93 | 62.09 | 40.81 | 98.12 | 103.37 | 108.89 |
| 172 | 35.17 | 33.18 | 18.62 | 96.25 | 98.15 | 96.41 |
| 173 | 34.85 | 34.54 | 7.11 | 96.99 | 98.30 | 98.40 |
| 174 | 28.15 | −1.56 | −3.64 | 109.52 | 102.35 | 100.49 |
| 175 | −2.78 | 15.47 | 1.99 | 103.73 | 102.04 | 101.67 |
| 176 | −10.70 | −11.26 | −5.19 | 99.39 | 102.57 | 102.65 |
| 177 | −21.12 | 8.29 | 7.94 | 101.53 | 98.37 | 104.29 |
| 178 | −4.96 | 6.95 | 9.32 | 99.59 | 99.03 | 102.11 |
| 179 | −11.56 | 14.95 | 13.32 | 97.18 | 98.74 | 104.08 |
| 180 | −22.55 | −2.19 | 3.86 | 99.68 | 102.83 | 104.42 |
| 181 | 18.33 | 23.72 | 11.96 | 98.45 | 95.23 | 95.61 |
| 182 | 7.21 | 12.94 | 1.33 | 98.76 | 96.15 | 93.81 |
| 183 | −1.73 | 10.67 | −1.39 | 92.49 | 98.16 | 91.24 |
| 184 | 24.72 | 36.82 | 7.02 | 93.66 | 97.05 | 94.16 |
| 185 | 7.63 | 22.45 | −1.97 | 101.95 | 104.06 | 99.53 |
| 186 | 14.07 | 14.14 | 2.39 | 101.64 | 104.84 | 101.03 |
| 187 | 4.71 | 14.29 | 1.10 | 96.57 | 98.02 | 92.58 |
| 188 | 39.36 | 31.71 | 1.00 | 98.72 | 97.00 | 90.91 |
| 189 | 55.67 | 50.23 | 27.97 | 98.54 | 102.30 | 94.68 |
| 190 | 15.10 | 9.35 | 3.37 | 93.58 | 101.74 | 95.54 |
| 191 | 41.06 | 36.70 | 6.72 | 99.69 | 104.22 | 89.84 |
| 192 | 41.76 | 38.34 | 11.22 | 96.93 | 99.47 | 90.58 |
| 193 | 44.50 | 38.17 | −1.24 | 96.90 | 97.12 | 93.72 |
| 194 | 12.35 | 14.97 | 10.19 | 104.04 | 104.22 | 96.76 |
| 195 | 38.24 | 28.80 | −0.41 | 105.23 | 107.31 | 102.01 |
| 196 | 11.11 | 10.08 | −7.50 | 99.60 | 98.91 | 93.16 |
| 197 | 13.09 | 14.58 | −11.09 | 101.05 | 101.08 | 94.76 |
| 198 | 23.77 | 26.43 | 1.81 | 102.54 | 105.85 | 98.23 |
| 199 | 38.07 | 46.54 | 2.95 | 97.45 | 99.16 | 92.95 |
| 200 | 2.08 | 11.30 | −13.24 | 91.58 | 95.91 | 90.60 |
| 201 | −10.78 | 7.52 | −26.00 | 93.28 | 94.54 | 93.11 |
| 202 | −7.76 | 1.29 | −17.80 | 98.07 | 94.29 | 93.99 |
| 203 | 8.48 | 13.54 | −22.46 | 99.13 | 98.11 | 100.67 |
| 204 | 16.17 | 16.71 | −11.84 | 101.64 | 103.54 | 102.29 |
| 205 | 1.49 | 20.89 | −33.42 | 97.38 | 98.98 | 92.53 |
| 206 | 38.54 | 29.63 | −29.97 | 97.23 | 97.34 | 99.26 |
| 207 | −1.37 | 3.03 | −16.26 | 98.84 | 107.05 | 101.12 |
| 208 | 45.85 | 45.15 | 5.10 | 91.07 | 101.35 | 91.20 |
| 209 | 9.61 | 10.69 | −23.36 | 101.05 | 104.94 | 98.16 |
| 210 | 21.93 | 8.97 | −14.33 | 104.85 | 102.56 | 98.34 |
| 211 | 13.50 | 6.63 | −9.80 | 103.74 | 98.85 | 96.40 |
| 212 | 29.26 | 35.40 | −4.10 | 103.38 | 103.19 | 106.45 |
| 213 | 20.77 | 8.45 | −14.89 | 103.91 | 107.83 | 106.27 |
| 214 | 23.40 | 16.59 | −20.18 | 105.23 | 102.33 | 97.17 |
| 215 | 1.29 | 11.46 | −26.44 | 102.20 | 102.14 | 94.33 |
| 216 | 1.33 | 13.43 | −10.08 | 99.43 | 98.72 | 105.63 |
| 217 | −2.30 | −0.33 | 7.10 | 101.59 | 104.17 | 90.33 |
| 218 | 50.42 | 54.87 | 22.10 | 98.70 | 98.34 | 93.18 |
| 219 | 24.51 | 32.49 | −0.87 | 101.62 | 101.26 | 94.87 |
| 220 | 44.23 | 43.30 | 14.24 | 100.96 | 101.52 | 97.46 |
| 221 | 61.13 | 58.20 | 23.60 | 102.00 | 101.71 | 107.93 |
| 222 | 84.81 | 78.32 | 45.07 | 104.16 | 104.25 | 106.29 |
| 223 | 72.48 | 70.75 | 41.27 | 101.42 | 105.09 | 104.46 |
| 224 | 7.33 | 0.84 | −7.20 | 99.01 | 101.96 | 105.23 |
| 225 | 11.91 | 13.73 | 8.63 | 101.00 | 103.72 | 103.58 |
| 226 | 16.19 | 20.67 | −4.17 | 96.79 | 97.92 | 93.05 |
| 227 | 51.81 | 54.04 | 27.20 | 95.34 | 93.93 | 100.37 |
| 228 | −12.80 | −0.92 | −7.23 | 101.01 | 94.02 | 91.67 |
| 229 | −13.24 | 8.90 | 3.86 | 95.92 | 101.58 | 87.51 |
| 230 | −41.29 | −1.20 | −8.77 | 98.01 | 103.73 | 96.38 |
| 231 | 22.12 | 14.46 | 6.15 | 99.59 | 95.05 | 97.41 |
| 232 | 21.97 | 8.22 | −11.18 | 99.07 | 97.81 | 92.20 |
| 233 | 23.04 | −6.66 | −27.62 | 95.31 | 91.27 | 97.85 |
| 234 | 21.33 | 0.14 | −22.08 | 95.80 | 98.01 | 90.20 |
| 235 | 19.80 | −6.64 | −32.32 | 94.09 | 94.67 | 93.95 |
| 236 | 14.94 | −4.37 | −29.08 | 97.41 | 105.07 | 99.35 |
| 237 | 20.89 | −0.35 | −22.71 | 101.40 | 104.76 | 100.06 |
| 238 | 18.99 | 3.26 | −18.47 | 98.23 | 104.93 | 97.68 |
| 239 | 6.04 | −0.56 | −9.81 | 98.02 | 106.08 | 101.99 |
| 240 | 38.64 | 39.23 | 21.66 | 87.98 | 97.92 | 89.46 |
| 241 | 31.51 | 25.43 | 19.85 | 96.82 | 94.90 | 96.68 |
| 242 | 45.17 | 46.14 | 14.54 | 93.01 | 96.67 | 91.63 |
| 243 | 33.07 | 29.08 | −6.58 | 99.59 | 101.03 | 91.56 |
| 244 | 33.84 | 17.88 | −0.52 | 101.84 | 100.63 | 89.78 |
| 245 | 37.16 | 30.12 | −11.43 | 104.41 | 102.31 | 105.14 |
| 246 | 27.25 | 34.93 | 5.33 | 102.08 | 104.30 | 104.76 |
| 247 | 23.44 | 14.46 | −10.51 | 98.85 | 101.44 | 97.86 |
| 248 | 13.31 | 14.44 | −19.94 | 98.21 | 103.56 | 103.54 |
| 249 | 14.13 | 2.98 | −7.14 | 90.47 | 102.69 | 90.93 |
| 250 | 0.00 | 5.76 | −8.15 | 97.07 | 106.82 | 95.37 |
| 251 | 13.63 | 15.78 | −2.17 | 96.23 | 106.20 | 97.45 |
| 252 | 27.07 | 22.13 | 12.67 | 98.27 | 107.51 | 102.54 |
| 253 | 67.21 | 66.81 | 38.53 | 103.51 | 107.05 | 103.60 |
| 254 | 43.54 | 42.90 | 22.73 | 105.76 | 106.68 | 103.90 |
| 255 | 27.52 | 28.06 | −7.63 | 105.43 | 106.54 | 100.98 |
| 256 | 50.38 | 40.15 | −4.44 | 103.12 | 107.29 | 98.06 |
| 257 | 27.23 | 11.46 | 1.87 | 103.70 | 102.63 | 107.04 |
| 258 | 9.16 | 13.01 | 21.18 | 93.51 | 94.01 | 98.09 |
| 259 | 9.30 | 1.02 | 22.31 | 99.97 | 105.63 | 99.76 |
| 260 | 4.35 | −0.46 | 12.51 | 99.46 | 106.84 | 101.20 |
| 261 | 3.34 | 15.21 | 2.64 | 102.54 | 103.11 | 101.22 |
| 262 | 18.03 | 15.06 | 9.33 | 102.17 | 106.35 | 101.15 |
| 263 | 11.82 | 12.00 | −0.65 | 106.11 | 104.26 | 105.13 |
| 264 | 13.24 | 14.10 | 11.37 | 104.64 | 108.45 | 106.10 |
| 265 | −5.55 | 2.32 | 5.30 | 107.23 | 113.87 | 106.08 |
| 266 | 10.61 | 15.97 | −1.94 | 104.75 | 103.01 | 107.55 |
| 267 | −26.92 | −9.82 | −10.69 | 92.41 | 98.02 | 94.97 |
| 268 | −14.00 | −21.01 | −13.29 | 96.73 | 96.02 | 98.22 |
| 269 | −5.71 | −3.23 | −6.66 | 99.54 | 99.25 | 98.40 |
| 270 | 2.22 | 4.66 | −10.30 | 101.70 | 97.38 | 97.87 |
| 271 | −13.04 | −6.06 | −22.98 | 100.72 | 103.32 | 102.37 |
| 272 | −4.15 | −2.52 | −18.98 | 101.29 | 99.82 | 98.13 |
| 273 | −10.79 | −10.86 | −13.65 | 102.99 | 100.29 | 104.73 |
| 274 | −11.87 | −17.06 | 2.15 | 101.48 | 101.87 | 99.36 |
| 275 | 0.74 | 16.39 | −5.65 | 98.76 | 97.54 | 103.05 |
| 276 | −2.23 | 14.85 | 13.24 | 89.95 | 92.81 | 92.65 |
| 277 | −11.99 | −0.50 | 1.68 | 90.32 | 88.48 | 90.22 |
| 278 | 5.53 | 4.10 | 2.51 | 92.56 | 96.29 | 94.60 |
| 279 | 15.46 | 3.26 | 13.79 | 88.41 | 102.40 | 101.82 |
| 280 | 24.62 | 13.89 | 10.97 | 92.93 | 101.65 | 100.21 |
| 281 | 14.14 | 10.44 | 10.09 | 93.03 | 102.49 | 101.75 |
| 282 | 7.84 | 6.05 | 4.54 | 96.51 | 106.50 | 111.31 |
| 283 | 13.92 | 12.95 | 3.83 | 93.18 | 102.15 | 108.77 |
| 284 | 30.74 | 34.19 | 9.27 | 98.21 | 106.78 | 105.84 |
| 285 | −0.08 | 5.01 | 6.37 | 105.30 | 102.29 | 99.12 |
| 286 | 19.50 | 9.25 | 7.93 | 92.21 | 100.17 | 95.76 |
| 287 | −4.89 | −10.96 | −7.45 | 94.57 | 95.62 | 99.97 |
| 288 | 15.20 | 16.55 | 4.19 | 96.81 | 102.21 | 100.86 |
| 289 | 22.48 | 14.56 | 13.36 | 100.28 | 113.57 | 109.81 |
| 290 | −1.97 | 14.86 | −6.53 | 104.60 | 103.72 | 103.26 |
| 291 | 7.19 | 21.99 | 12.71 | 101.13 | 111.79 | 110.78 |
| 292 | 6.78 | 17.45 | 6.06 | 100.57 | 97.86 | 105.30 |
| 293 | 25.06 | 26.85 | 17.92 | 99.35 | 110.38 | 103.27 |
| 294 | 10.90 | 23.76 | 7.92 | 106.46 | 111.69 | 104.18 |
| 295 | 35.65 | 40.67 | 23.69 | 96.43 | 97.92 | 94.88 |
| 296 | 18.01 | 24.60 | 12.48 | 93.77 | 102.18 | 101.42 |
| 297 | −4.28 | −12.95 | 3.63 | 97.32 | 100.12 | 107.87 |
| 298 | 13.32 | 6.78 | 0.81 | 99.52 | 108.65 | 107.14 |
| 299 | −12.28 | −2.34 | −6.20 | 101.61 | 112.12 | 104.69 |
| 300 | 42.97 | 31.31 | −4.82 | 101.71 | 109.66 | 106.59 |
| 301 | −21.03 | −14.45 | −2.78 | 99.64 | 108.50 | 115.97 |
| 302 | −10.13 | −3.15 | 0.00 | 99.44 | 110.97 | 111.18 |
| 303 | 13.59 | 16.07 | 1.26 | 98.83 | 104.71 | 107.08 |
| 304 | 2.38 | 9.03 | −11.11 | 100.28 | 98.12 | 98.71 |
| 305 | 8.31 | 28.32 | 5.54 | 103.57 | 104.75 | 98.83 |
| 306 | 33.06 | 52.20 | 25.31 | 92.86 | 102.01 | 97.59 |
| 307 | 14.59 | 27.42 | 16.64 | 96.52 | 107.89 | 107.90 |
| 308 | 31.92 | 33.29 | 21.49 | 94.54 | 108.68 | 99.95 |
| 309 | 23.20 | 23.91 | 19.42 | 92.83 | 101.62 | 99.54 |
| 310 | 12.01 | 11.79 | 12.55 | 96.22 | 110.59 | 106.09 |
| 311 | 31.19 | 32.15 | 18.08 | 89.34 | 97.90 | 97.62 |
| 312 | 40.71 | 55.74 | 38.57 | 98.42 | 107.25 | 97.64 |
| 313 | 41.41 | 50.97 | 40.33 | 96.41 | 108.12 | 92.66 |
| 314 | 14.01 | 31.41 | −0.78 | 98.21 | 109.88 | 94.95 |
| 315 | 26.26 | 29.33 | 5.07 | 90.61 | 106.80 | 98.26 |
| 316 | 37.08 | 46.50 | 12.96 | 93.74 | 107.11 | 104.14 |
| 317 | 51.78 | 43.32 | 12.22 | 88.27 | 104.56 | 100.58 |
| 318 | 33.47 | 31.48 | 0.53 | 94.93 | 110.68 | 100.29 |
| 319 | 11.31 | 18.81 | −10.01 | 98.24 | 110.36 | 112.52 |
| 320 | 33.29 | 39.26 | 20.22 | 88.29 | 106.49 | 101.75 |
| 321 | −2.96 | 9.62 | 5.34 | 105.21 | 113.09 | 107.79 |
| 322 | 18.68 | 39.85 | 24.22 | 95.12 | 103.05 | 99.04 |
| 323 | −2.15 | 5.60 | 5.09 | 96.44 | 109.51 | 98.75 |
| 324 | 47.44 | 55.26 | 29.99 | 89.90 | 92.43 | 94.77 |
| 325 | 56.54 | 57.44 | 25.20 | 90.87 | 90.49 | 98.42 |
| 326 | 54.63 | 61.27 | 40.35 | 89.15 | 97.52 | 95.73 |
| 327 | 50.64 | 58.86 | 27.99 | 93.07 | 96.65 | 99.67 |
| 328 | 54.26 | 52.11 | 30.99 | 103.06 | 104.25 | 96.28 |
| 329 | 26.55 | 26.12 | 2.44 | 103.91 | 101.51 | 100.06 |
| 330 | 9.37 | 23.31 | 12.48 | 102.16 | 100.90 | 98.13 |
| 331 | 21.72 | 22.05 | 9.94 | 102.31 | 104.94 | 97.11 |
| 332 | 12.40 | 13.59 | −11.55 | 100.05 | 104.66 | 98.42 |
| 333 | 63.01 | 51.36 | 16.76 | 104.07 | 100.30 | 104.80 |
| 334 | 26.69 | 19.54 | 1.94 | 102.83 | 101.42 | 99.88 |
| 335 | 30.37 | 27.46 | −6.52 | 93.88 | 101.43 | 97.67 |
| 336 | 26.45 | 33.43 | 15.13 | 93.86 | 93.51 | 95.37 |
| 337 | 26.22 | 21.56 | 11.07 | 92.21 | 105.02 | 98.08 |
| 338 | 15.56 | 7.76 | −9.44 | 96.78 | 98.57 | 97.30 |
| 339 | 34.37 | 31.12 | 14.82 | 100.11 | 102.71 | 101.95 |
| 340 | 59.51 | 51.71 | 39.14 | 88.92 | 99.63 | 100.50 |
| 341 | 47.82 | 37.03 | 19.96 | 90.58 | 101.85 | 98.94 |
| 342 | 62.68 | 49.22 | 20.96 | 95.56 | 102.43 | 96.82 |
| 343 | 59.88 | 43.35 | 25.09 | 93.46 | 103.94 | 99.58 |
| 344 | 37.96 | 27.38 | 10.37 | 94.16 | 99.37 | 98.71 |
| 345 | −3.84 | 18.41 | −9.62 | 96.05 | 98.00 | 99.35 |
| 346 | 35.46 | 26.05 | −6.00 | 96.12 | 98.96 | 98.83 |
| 347 | 24.91 | 33.00 | −2.81 | 97.47 | 97.41 | 95.44 |
| 348 | 65.80 | 55.42 | 21.00 | 97.61 | 97.89 | 102.76 |
| 349 | −18.52 | −15.49 | −10.48 | 95.53 | 98.66 | 100.43 |
| 350 | 25.78 | 17.55 | −3.37 | 97.15 | 100.08 | 101.89 |
| 351 | 28.09 | 20.40 | 9.27 | 97.92 | 101.17 | 101.97 |
| 352 | 21.89 | 25.05 | −3.63 | 90.30 | 100.84 | 105.31 |
| 353 | −7.60 | −1.19 | −8.35 | 93.24 | 101.22 | 105.10 |
| 354 | 16.19 | 23.11 | −6.55 | 93.49 | 94.82 | 95.57 |
| 355 | −7.88 | −0.33 | −7.55 | 94.65 | 98.80 | 97.25 |
| 356 | 13.33 | 13.26 | −11.92 | 99.34 | 103.85 | 98.17 |
| 357 | −1.55 | −4.03 | −5.62 | 95.33 | 99.62 | 99.17 |
| 358 | 3.46 | −0.23 | −15.71 | 100.23 | 97.59 | 101.83 |
| 359 | 16.19 | −2.46 | −10.76 | 99.70 | 101.80 | 97.95 |
| 360 | 14.52 | 3.54 | 17.38 | 98.78 | 100.55 | 97.87 |
| 361 | 12.02 | 17.57 | −0.65 | 95.21 | 105.08 | 101.48 |
| 362 | −4.38 | 0.74 | −0.49 | 93.09 | 104.40 | 100.92 |
| 363 | 21.62 | 30.44 | 7.08 | 85.34 | 93.98 | 97.70 |
| 364 | 28.72 | 35.24 | 0.54 | 91.16 | 99.18 | 98.75 |
| 365 | 31.66 | 43.95 | 12.03 | 95.03 | 98.16 | 97.03 |
| 366 | 34.71 | 40.19 | 5.72 | 97.43 | 99.89 | 98.90 |
| 367 | 33.60 | 35.22 | 10.12 | 100.04 | 100.33 | 97.63 |
| 368 | 28.94 | 12.52 | 1.16 | 94.33 | 95.19 | 100.37 |
| 369 | 55.35 | 35.43 | 5.93 | 92.30 | 95.88 | 101.72 |
| 370 | 50.43 | 49.81 | 13.28 | 90.56 | 97.40 | 99.78 |
| 371 | 28.97 | 31.48 | −5.99 | 99.16 | 100.36 | 102.50 |
| 372 | 2.62 | −4.89 | −1.96 | 95.84 | 100.26 | 97.50 |
| 373 | −0.08 | 0.30 | −21.78 | 97.68 | 95.79 | 105.68 |
| 374 | −6.80 | 2.06 | 0.31 | 94.66 | 97.48 | 102.35 |
| 375 | −20.26 | −6.85 | −13.67 | 92.00 | 94.62 | 91.64 |
| 376 | −27.64 | −2.00 | −16.87 | 95.42 | 96.79 | 91.71 |
| 377 | −21.57 | −19.05 | −16.76 | 97.45 | 100.30 | 98.60 |
| 378 | −43.00 | −40.96 | −34.24 | 96.85 | 97.50 | 96.03 |
| 379 | −33.27 | −38.38 | −31.21 | 95.89 | 99.21 | 96.91 |
| 380 | −19.77 | −14.96 | −12.33 | 94.08 | 99.77 | 98.38 |
| 381 | −9.00 | −20.39 | −27.54 | 95.76 | 97.56 | 101.71 |
| 382 | −20.63 | −17.93 | −33.16 | 94.93 | 97.94 | 105.20 |
| 383 | −12.55 | −33.45 | −20.39 | 91.48 | 99.48 | 102.78 |
| 384 | 11.98 | 13.93 | −6.54 | 95.98 | 100.98 | 96.43 |
| 385 | −0.45 | 11.66 | 8.33 | 97.86 | 101.23 | 100.14 |
| 386 | 8.41 | 15.56 | 0.44 | 110.65 | 101.21 | 104.15 |
| 387 | 48.91 | 39.09 | 21.49 | 99.70 | 103.20 | 103.29 |
| 388 | 46.76 | 24.20 | −3.90 | 99.26 | 101.05 | 103.31 |
| 389 | 42.99 | 32.83 | 10.15 | 100.03 | 101.93 | 102.81 |
| 390 | 31.39 | 42.36 | −5.37 | 102.52 | 103.04 | 100.79 |
| 391 | 58.92 | 50.04 | 26.86 | 102.89 | 103.14 | 98.70 |
| 392 | 61.86 | 56.97 | 18.83 | 98.41 | 104.40 | 99.38 |
| 393 | 48.05 | 51.00 | 23.93 | 92.22 | 96.99 | 93.89 |
| 394 | 22.57 | 16.81 | 11.21 | 97.85 | 99.70 | 95.68 |
| 395 | 39.19 | 32.15 | −5.97 | 102.16 | 103.84 | 102.47 |
| 396 | 14.01 | 7.28 | 1.11 | 104.22 | 99.84 | 97.85 |
| 397 | 15.64 | 20.08 | −18.09 | 104.06 | 99.85 | 98.78 |
| 398 | 27.09 | 13.83 | −4.58 | 101.69 | 101.50 | 98.48 |
| 399 | 13.71 | 2.77 | −14.45 | 99.12 | 101.60 | 97.93 |
| 400 | −7.11 | −1.40 | −25.16 | 97.90 | 99.49 | 99.38 |
| 401 | 25.46 | 17.81 | 1.69 | 98.31 | 104.27 | 103.33 |
| 402 | 3.18 | 17.64 | 24.96 | 90.37 | 94.75 | 95.87 |
| 403 | 18.58 | 26.80 | 20.48 | 94.49 | 98.99 | 96.32 |
| 404 | 28.02 | 28.76 | 2.60 | 93.50 | 100.33 | 100.23 |
| 405 | 18.82 | 12.31 | 11.23 | 96.26 | 97.10 | 97.80 |
| 406 | 20.60 | 28.67 | 2.45 | 94.48 | 97.54 | 96.24 |
| 407 | 2.95 | 13.84 | 3.90 | 96.60 | 97.86 | 95.80 |
| 408 | 69.13 | 55.88 | 17.43 | 97.18 | 94.56 | 98.79 |
| 409 | 71.13 | 62.34 | 24.05 | 98.79 | 96.70 | 97.35 |
| 410 | 23.77 | 3.56 | 21.75 | 97.25 | 99.40 | 102.21 |
| 411 | 20.52 | 12.82 | 6.93 | 87.10 | 98.34 | 94.89 |
| 412 | 34.68 | 22.44 | 0.91 | 92.77 | 103.32 | 96.15 |
| 413 | −24.52 | 0.42 | 3.41 | 99.95 | 103.89 | 97.97 |
| 414 | 27.62 | 21.32 | 4.58 | 99.90 | 102.35 | 99.00 |
| 415 | −7.34 | −4.53 | −5.81 | 98.73 | 102.54 | 99.93 |
| 416 | 19.68 | 8.93 | −1.82 | 99.89 | 104.57 | 97.95 |
| 417 | −4.66 | 2.52 | −4.37 | 96.87 | 103.47 | 98.89 |
| 418 | 14.52 | 1.38 | 0.36 | 94.77 | 102.91 | 95.45 |
| 419 | 15.11 | 5.52 | −1.31 | 96.51 | 105.30 | 101.36 |
| 420 | 11.09 | 14.17 | 4.56 | 91.49 | 97.42 | 106.30 |
| 421 | −0.18 | 5.44 | −4.15 | 91.14 | 95.41 | 100.05 |
| 422 | 24.55 | 15.03 | 0.83 | 93.76 | 100.22 | 102.43 |
| 423 | 42.05 | 45.83 | 25.09 | 93.64 | 104.07 | 97.48 |
| 424 | 44.81 | 42.34 | 28.35 | 78.76 | 94.74 | 99.68 |
| 425 | 5.45 | 17.81 | −8.31 | 94.40 | 101.15 | 98.94 |
| 426 | 25.87 | 18.04 | 8.28 | 94.17 | 104.08 | 98.96 |
| 427 | 17.76 | 15.06 | 10.31 | 89.83 | 98.20 | 103.13 |
| 428 | 36.82 | 25.44 | 11.61 | 79.00 | 98.77 | 102.07 |
| 429 | 53.36 | 49.45 | 30.57 | 86.64 | 95.84 | 95.62 |
| 430 | 19.00 | 16.76 | 3.52 | 97.98 | 102.63 | 102.36 |
| 431 | 32.65 | 30.01 | 6.99 | 95.33 | 102.80 | 103.28 |
| 432 | −8.29 | 2.15 | −0.99 | 96.49 | 98.19 | 97.00 |
| 433 | 5.02 | −5.87 | −19.44 | 100.56 | 106.26 | 97.91 |
| 434 | 36.19 | 37.23 | 1.44 | 99.88 | 93.08 | 93.61 |
| 435 | −11.27 | −3.48 | −17.19 | 106.42 | 100.65 | 96.45 |
| 436 | 21.09 | 26.67 | −4.13 | 107.31 | 105.14 | 100.39 |
| 437 | −10.63 | −10.54 | 1.73 | 104.60 | 95.31 | 98.01 |
| 438 | −24.85 | 0.48 | −11.85 | 102.03 | 102.66 | 95.76 |
| 439 | −1.12 | −23.39 | −18.88 | 99.18 | 102.47 | 97.70 |
| 440 | −8.09 | −7.33 | −5.48 | 94.22 | 89.62 | 104.04 |
| 441 | 43.66 | 46.52 | 21.28 | 95.64 | 103.05 | 99.09 |
| 442 | 70.00 | 68.51 | 51.65 | 94.03 | 98.36 | 96.73 |
| 443 | −2.27 | −10.41 | −16.58 | 98.78 | 97.22 | 93.45 |
| 444 | −4.33 | 3.62 | 7.61 | 96.38 | 97.11 | 98.10 |
| 445 | 27.13 | 18.78 | −11.78 | 99.09 | 95.26 | 95.54 |
| 446 | 20.40 | 8.71 | 5.78 | 104.55 | 94.63 | 98.83 |
| 447 | 38.22 | 31.08 | 6.55 | 101.43 | 95.00 | 95.42 |
| 448 | −8.18 | 4.46 | 10.04 | 98.70 | 100.47 | 97.35 |
| 449 | −4.38 | 6.19 | 8.06 | 101.23 | 98.25 | 101.39 |
| 450 | 7.89 | 7.25 | −2.08 | 101.66 | 104.87 | 97.01 |

### Differential Gene Expression Assay in Huh-7 Cells

Cell Culture and siRNA Treatment

[0611] The ability of a subset of the siRNA sequences disclosed in Table 2 to knockdown the expression of endogenous PNPLA3 in Huh-7 cells, which are homozygous for the rs738409[G](I148M) variant, was determined. Each siRNA molecule tested consisted of a duplex of two siRNA strands, the sense strand and the antisense strand, corresponding to certain siRNA Duplex ID Nos. in Table 2 above.

[0612] Hepatoma-derived Huh-7 cells (JCRB Cell Bank, JCRB0403) were routinely cultured in DMEM (Corning, 10-013-CM) supplemented with 10% FBS and 1% P/S at 37° C. and 5% CO₂ until 80-90% confluency. Cells were then detached with 0.05% trypsin (Corning, 25-052-CV), resuspended in fresh DMEM, and seeded into collagen-coated, 96-well microplates. Cells were transfected with serially diluted siRNA and Opti-MEM™ using Lipofectamine RNAiMAX (Invitrogen, 13778100). A mock transfection control, which consisted of transfecting 1×phosphate-buffered saline, was included.

### Cell Lysis and RT-qPCR

[0613] After about 48 hours of siRNA treatment, the Huh-7 cells were processed with the TaqMan Fast Advanced Cells-to-Ct Kit (Invitrogen, A35378), according to the manufacturer's protocol. The cell lysates were used for reverse transcription, and the resulting cDNA was diluted 1:2 with nuclease-free, distilled water (Invitrogen, 10977015). Gene expression was measured using TaqMan Fast Advanced Master Mix (Applied Biosystems, 4444964) and the PNPLA3 and ACTB TaqMan Gene Expression assays (Applied Biosystems, 4331182); ACTB served as the endogenous control housekeeping gene. Aliquots of 10 pL were run on the QuantStudio™ 6 Pro Real-Time PCR System (Applied Biosystems) and relative quantification (RQ) of gene expression was calculated via the 2^{-ΔΔCt} method. Gene expression of siRNA wells was normalized to mock wells, percent inhibition was calculated, and dose-response curves were fitted by non-linear regression with variable slope.

[0614] Additionally, CellTiter-Glo© Luminescent Cell Viability Assays were also performed with similarly treated Huh-7 cells to assess cytotoxic effects. Assays were performed according to the manufacturer's protocol, and luminescence was measured on an EnVision plate reader. The luminescence from siRNA-treated wells were then normalized to luminescence of mock-treated wells, and percentage viability was calculated.

[0615] The results of the RT-qPCR assay and CellTiter-Glo viability assay in Huh-7 cells are provided in Table 4 below.

TABLE 4
RT-qPCR Assay and CellTiter-Glo Viability Assay in Huh-7 Cells

| siRNA | RT-qPCR in Huh-7 | | CellTiter-Glo |
|---|---|---|---|
| Duplex ID | | Maximum % PNPLA3 | in Huh-7 |
| No. (MDx) | EC₅₀ (nM) | RNA inhibition | CC₅₀ (nM) |
| 14 | 0.919 | 68 | >20 |
| 93 | 0.552 | 68 | >20 |
| 95 | 0.256 | 58 | >20 |
| 96 | 0.323 | 69 | >20 |
| 98 | 0.117 | 48 | >20 |
| 99 | 0.243 | 73 | >20 |
| 102 | 0.221 | 69 | >20 |
| 104 | 0.891 | 66 | >20 |
| 105 | 0.580 | 68 | >20 |
| 106 | 0.164 | 78 | >20 |
| 107 | 0.263 | 70 | >20 |
| 108 | 0.194 | 63 | >20 |
| 109 | 0.625 | 61 | >20 |
| 112 | 0.462 | 56 | >20 |
| 115 | — | 55 | >20 |
| 116 | 4.370 | 89 | >20 |
| 119 | 1.260 | 80 | >20 |
| 121 | 0.172 | 80 | >20 |
| 122 | 0.732 | 62 | >20 |
| 124 | 0.028 | 56 | >20 |
| 141 | 0.040 | 63 | >20 |
| 142 | 1.550 | 78 | >20 |
| 143 | 0.046 | 68 | >20 |
| 149 | 0.208 | 51 | >20 |
| 150 | — | 68 | >20 |
| 171 | 0.109 | 68 | >20 |
| 189 | 1.570 | 71 | >20 |
| 218 | — | 37 | >20 |
| 221 | 0.296 | 68 | >20 |
| 222 | 0.382 | 62 | >20 |
| 223 | — | 64 | >20 |
| 227 | 0.025 | 71 | >20 |
| 253 | 0.919 | 70 | >20 |
| 256 | — | 79 | >20 |
| 306 | 0.226 | 50 | >20 |
| 312 | 0.298 | 58 | >20 |
| 313 | 0.310 | 61 | >20 |
| 317 | 1.100 | 55 | >20 |
| 324 | 1.840 | 73 | >20 |
| 325 | 0.679 | 74 | >20 |
| 326 | 2.400 | 56 | >20 |
| 327 | 0.876 | 73 | >20 |
| 328 | 0.148 | 68 | >20 |
| 333 | 0.062 | 69 | >20 |
| 340 | 0.008 | 68 | >20 |
| 342 | 0.029 | 65 | >20 |
| 343 | 0.070 | 77 | >20 |
| 348 | 0.035 | 63 | >20 |
| 369 | 0.153 | 50 | >20 |
| 370 | 0.052 | 70 | >20 |
| 391 | 0.074 | 60 | >20 |
| 392 | 0.588 | 56 | >20 |
| 393 | 2.303 | 51 | >20 |
| 408 | 0.564 | 69 | >20 |
| 409 | 0.176 | 70 | >20 |
| 429 | — | 31 | >20 |
| 442 | 0.252 | 80 | >20 |
| 461 | 0.859 | 63 | >10 |
| 479 | 0.185 | 46 | >10 |
| 463 | 0.247 | 70 | >10 |
| 481 | 0.029 ± 0.038 | 65 ± 4 | >10 |
| 453 | 0.031 ± 0.010 | 45 ± 3 | >10 |
| 471 | 0.010 ± 0.004 | 42 ± 1 | >10 |
| 459 | 0.047 ± 0.031 | 64 ± 8 | >10 |
| 477 | 0.014 ± 0.005 | 65 ± 8 | >10 |
| 458 | 2.144 | / | >10 |
| 476 | 0.554 | 65 | >10 |
| 454 | 0.128 | 72 | >10 |
| 472 | 0.034 ± 0.042 | 73 ± 6 | >10 |
| 462 | 0.224 | 50 | >10 |
| 480 | 0.116 | 51 | >10 |
| 455 | 0.267 | 43 | >10 |
| 473 | 0.106 | 45 | >10 |
| 467 | 0.090 ± 0.074 | 69 ± 7 | >10 |
| 485 | 0.044 ± 0.039 | 73 ± 3 | >10 |
| 466 | 0.064 | 80 | >10 |
| 484 | 0.012 | 80 | >10 |
| 468 | 0.123 | 67 | >10 |
| 486 | 0.040 | 76 | >10 |
| 452 | 0.034 ± 0.004 | 62 ± 12 | >10 |
| 470 | 0.012 ± 0.006 | 61 ± 3 | >10 |
| 451 | 0.013 ± 0.003 | 52 ± 1 | >10 |
| 469 | 0.037 ± 0.027 | 52 ± 8 | >10 |
| 456 | 0.074 ± 0.081 | 69 ± 6 | >10 |
| 474 | 0.012 | 71 ± 4 | >10 |
| 457 | 0.318 | 57 | >10 |
| 475 | 0.027 | 44 | >10 |
| 460 | 0.035 ± 0.043 | 76 ± 7 | >10 |
| 478 | 0.001 ± 0.001 | 72 ± 7 | >10 |
| 465 | 0.042 | 73 | >10 |
| 483 | 0.033 | 77 | >10 |
| 464 | 0.031 | 63 | >10 |
| 482 | 0.017 | 61 | >10 |
| 535 | 0.053 | 72 | >10 |
| 547 | 0.104 | 83 | >10 |
| 536 | 0.013 | 59 | >10 |
| 548 | 0.012 | 55 | >10 |
| 537 | 0.028 | 69 | >10 |
| 549 | 0.012 | 69 | >10 |
| 538 | 0.062 | 64 | >10 |
| 550 | 0.001 | 66 | >10 |
| 539 | 0.065 | 74 | >10 |
| 551 | 0.007 | 72 | >10 |
| 540 | 0.010 | 79 | >10 |
| 552 | 0.003 | 82 | >10 |
| 541 | 0.009 | 53 | >10 |
| 553 | 0.001 | 46 | >10 |
| 542 | 0.018 | 56 | >10 |
| 554 | 0.003 | 49 | >10 |
| 543 | 0.162 | 67 | >10 |
| 555 | 0.010 | 61 | >10 |
| 544 | 0.012 | 70 | >10 |
| 556 | 0.014 | 72 | >10 |
| 545 | 0.153 | 72 | >10 |
| 557 | 0.072 | 62 | >10 |
| 546 | 0.335 | 80 | >10 |
| 558 | 0.157 | 80 | >10 |
| 559 | 0.923 | 52 | >10 |
| 571 | 0.227 | 67 | >10 |
| 560 | 0.034 | 39 | >10 |
| 572 | 0.140 | 46 | >10 |
| 561 | 0.153 | 67 | >10 |
| 573 | 0.101 | 62 | >10 |
| 562 | 0.054 | 65 | >10 |
| 574 | 0.008 | 73 | >10 |
| 563 | 0.117 | 71 | >10 |
| 575 | 0.013 | 75 | >10 |
| 564 | 0.200 | 79 | >10 |
| 576 | 0.062 | 76 | >10 |
| 565 | 0.019 | 59 | >10 |
| 577 | 0.003 | 59 | >10 |
| 566 | 0.458 | 68 | >10 |
| 578 | 0.008 | 63 | >10 |
| 567 | 0.152 | 56 | >10 |
| 579 | 0.129 | 50 | >10 |
| 568 | 0.731 | 79 | >10 |
| 580 | 0.031 | 61 | >10 |
| 569 | 0.850 | 36 | >10 |
| 581 | 0.210 | 37 | >10 |
| 570 | 0.756 | 80 | >10 |
| 582 | 0.401 | 80 | >10 |

### Example 61: In Vivo Effect Single Dose Administration of siRNA Molecules in a Mouse Model

[0616] Certain siRNA molecules were selected for initial pharmacokinetic/pharmacodynamic studies in vivo. To enhance targeted delivery to hepatocytes, a GalNAc ligand was incorporated at the 3′ end of the sense strand via standard phosphoramidite chemistry. The specific GalNAc ligand used (“GalNAc4-ps-GalNAc4-ps GalNAc4” or “p-(ps)₂-GalNAc4”), shown below, includes three monomeric “GalNAc4” derivative units linked through two phosphorothioate linkages, where one GalNAc4 unit is linked to the 3′ end nucleotide on the sense strand via a standard phosphodiester linkage.

[chemical structure]

### Structure of “Monomeric GalNAc4 Phosphoramidite”

[chemical structure]

### Structure of “Monomeric GalNAc4”

[chemical structure]

### Structure of “GalNAc4-ps-GalNAc4-ps GalNAc4” or “p-(ps)₂-GalNAc4”

[0617] A C57BL/6 human PNPLA3-knock-in (hPNPLA3-KI) mouse model, which expresses a human PNPLA3 insert, was used for in vivo PK/PD studies. On Day 0, 2-month-old mice were administered either a single subcutaneous (SC) dose of a GalNAc-conjugated siRNA duplex or a no-drug vehicle (n=5 animals per group in each of seven groups). The animals were sacrificed on Day 4 (about 96 hours post-dose). The right, lateral liver lobe of each animal was collected for RT-qPCR and the left, lateral liver lobe was collected for PK analysis. RT-qPCR was performed to measure levels of human PNPLA3 expression.

[0618] For RT-qPCR, RNA was extracted using the RNeasy Mini Kit (Qiagen, 74106), according to the manufacturer's protocol. RNA quantity and quality was analyzed with a NanoDrop™ Lite Spectrophotometer (Thermo Scientific), and cDNA was synthesized using the SuperScript IV VILO Master Mix (Invitrogen, 11756500), according to the manufacturer's protocol. Gene expression was measured using TaqMan Fast Advanced Master Mix (Applied Biosystems, 4444964), and the following TaqMan Gene Expression assays (Applied Biosystems, 4331182): Actb (Mm00607939_s1) and PNPLA3 (Hs00228747_ml). Actb served as the endogenous control gene. RT-qPCR reactions were run on the QuantStudio™ 6 Pro Real-Time PCR System (Applied Biosystems). The RQ of gene expression was calculated via the 2^{-ΔΔCt} (RQ) method. Results are presented as expression relative to the expression levels of vehicle control samples.

[0619] In one study, the GalNAc-conjugated siRNA duplexes of Table 5 or a no-drug vehicle were tested in accordance with the procedure outlined above at 1 mg/kg, 3 mg/kg and/or 10 mg/kg. The results are shown in Table 5 and FIGS. 9-11.

TABLE 5
Modified siRNA Sequences Used for Further In Vivo Study

| siRNA | | | | | | | |
|---|---|---|---|---|---|---|---|
| Duplex ID | SEQ ID | Sense Strand Base Sequence + | SEQ ID | Antisense Strand Base Sequence + | %RNA Inhibition (Drug v. Vehicle) | | |
| No. (MDx) | NO | Modifications (5′-3′) | NO | Modifications (5′-3′) | 1 mg/kg | 3 mg/kg | 10 mg/kg |
| 665(585) | 2293 | mApsmUpsmGmGfAmGfGfAfGmUm | 2317 | mUpsfUpsmGmUmCfAmCmUmCmA | | 33 | |
| | | GmAmGmUmGmAmCmAmA-p- | | mCmUmCfCmUfCmCmAmUpsmUpsm | | | |
| | | (ps)2-GalNAc4 | | U | | | |
| 666(593) | 2294 | mApsmUpsmGmCmCmAfAmAfAfCfA | 2318 | mCpsfGpsmGmUmGfAmUmGmGmU | | 43 | |
| | | mAmCmCmAmUmCmAmCmCmG-p- | | mUmGmUfUmUfUmGmGmCmAmUp | | | |
| | | (ps)2-GalNAc4 | | smUpsmU | | | |
| 667(597) | 2295 | mGpsmApsmAmGfUmCmGmUfGfGf | 2319 | mUpsfApsmCmCmAmAmGmGmCmA | | 33 | |
| | | AmUmGfCmCmUmUmGfGmUmA-p- | | mUmCmCfAmCmGmAmCmUmUmCp | | | |
| | | (ps)2-GalNAc4 | | smUpsmU | | | |
| 668(598) | 2296 | mGpsmApsmAmGfUmCmGmUfGfGf | 2320 | vmUpsfApsmCmCmAmAmGmGmCm | | 36 | |
| | | AmUmGfCmCmUmUmGfGmUmA-p- | | AmUmCmCfAmCmGmAmCmUmUmC | | | |
| | | (ps)2-GalNAc4 | | psmUpsmU | | | |
| 663(591) | 2186 | mUpsmCpsmGmUmGmGfAmUfGfCf | 2024 | mApsfApsmCmAmUfAmCmCmAmAm | −2 | 51 | 61 |
| | | CmUmUmGmGmUmAmUmGmUmU- | | GmGmCfAmUfCmCmAmCmGmApsm | | | |
| | | p-(ps)2-GalNAc4 | | UpsmU | | | |
| 664(592) | 2292 | mUpsmCpsmGmUmGmGfAmUfGfCf | 2316 | vmApsfApsmCmAmUfAmCmCmAmA | | 29 | |
| | | CmUmUmGmGmUmAmUmGmUmU- | | mGmGmCfAmUfCmCmAmCmGmAps | | | |
| | | p-(ps)2-GalNAc4 | | mUpsmU | | | |
| 649(599) | 2278 | mUpsmCpsmCmAmAmAfGmAfCfGf | 2302 | mApsfUpsmCmCmAfCmGmAmCmUm | 6 | 56 | 35 |
| | | AmAmGmUmCmGmUmGmGmAmU- | | UmCmGfUmCfUmUmUmGmGmApsm | | | |
| | | p-(ps)2-GalNAc4 | | UpsmU | | | |
| 670(600) | 2298 | mUpsmCpsmCmAmAmAfGmAfCfGf | 2322 | vmApsfUpsmCmCmAfCmGmAmCmU | | 57 | |
| | | AmAmGmUmCmGmUmGmGmAmU- | | mUmCmGfUmCfUmUmUmGmGmAps | | | |
| | | p-(ps)2-GalNAc4 | | mUpsmU | | | |
| 583 | 2148 | mApsmUpsmGmCfCmUfUfGfGmUm | 1936 | mCpsfApsmGmGmAfAmCmAmUmAm | 35* | 51* | 65 |
| | | AmUmGmUmUmCmCmUmG-p- | | CmCmAfAmGfGmCmAmUpsmUpsmU | | | |
| | | (ps)2-GalNAc4 | | | | | |
| 669(589) | 2297 | mGpsmUpsmGmUmCmUfGmAfCfUf | 2321 | mUpsfUpsmUmGmGfAmCmCmGmA | 2 | 52 | 53 |
| | | UmUmCmGmGmUmCmCmAmAmA- | | mAmAmGfUmCfAmGmAmCmAmCps | | | |
| | | p-(ps)2-GalNAc4 | | mUpsmU | | | |
| 609(584) | 2148 | mApsmUpsmGmCfCmUfUfGfGmUm | 2188 | vmCpsfApsmGmGmAfAmCmAmUmA | 54 | | |
| | | AmUmGmUmUmCmCmUmG- | | mCmCmAfAmGfGmCmAmUpsmUpsm | | | |
| | | GalNAc4psGalNAc4psGalNAc4 | | U | | | |
| 610 | 2149 | mApsmUpsmGmCfCmUfUfGfGmUm | 2189 | mApsfApsmGmGmAfAmCmAmUmAm | 46 | | |
| | | AmUmGmUmUmCmCmUmG-p- | | CmCmAfAmGfGmCmAmUpsmUpsmU | | | |
| | | (ps)2-GalNAc4 | | | | | |
| 611 | 2150 | mApsmUpsmGmCfCmUfUfGfGmUm | 2190 | vmApsfApsmGmGmAfAmCmAmUmA | 77 | | |
| | | AmUmGmUmUmCmCmUmG- | | mCmCmAfAmGfGmCmAmUpsmUpsm | | | |
| | | GalNAc4psGalNAc4psGalNAc4 | | U | | | |
| 612 | 2151 | mApsmUpsmGmCfCmUfUfGfGmUm | 2191 | mUpsfApsmGmGmAfAmCmAmUmA | 67 | | |
| | | AmUmGmUmUmCmCmUmG-p- | | mCmCmAfAmGfGmCmAmUpsmUpsm | | | |
| | | (ps)2-GalNAc4 | | U | | | |
| 613 | 2152 | mApsmUpsmGmCfCmUfUfGfGmUm | 2192 | vmUpsfApsmGmGmAfAmCmAmUmA | 76 | | |
| | | AmUmGmUmUmCmCmUmG-p- | | mCmCmAfAmGfGmCmAmUpsmUpsm | | | |
| | | (ps)2-GalNAc4 | | U | | | |
| 622 | 2161 | GalNAc4psGalNAc4psGalNAc4- | 2201 | mCpsfApsmGmGmAfAmCmAmUmAm | 55 | | |
| | | mAmUmGmCfCmUfUfGfGmUmAmU | | CmCmAfAmGfGmCmAmUpsmUpsmU | | | |
| | | mGmUmUmCmCmUmG- | | | | | |
| | | GalNAc4psGalNAc4psGalNAc4 | | | | | |
| 623 | 2162 | mApsmUpsmGmCfCmUfUfGfGmUm | 2202 | mCpsfApsmGmGmAfAmCmAmUmAm | 42 | | |
| | | AmUmGmUmUmCmCmUmG- | | CmCmAfAmGfGmCmAmUpsmUpsmU | | | |
| | | GalNAc4psGalNAc4psGalNAc4ps | | | | | |
| | | GalNAc4 | | | | | |
| 621 | 2160 | mApsmUpsmGmCfCmUfUfGfGmUm | 2200 | mCpsfApsmGmGfAmAmCfAmUmAmC | 32 | | |
| | | AmUmGmUmUmCmCmUmG- | | mCmAfAmGmGfCmAmUpsmUpsmU | | | |
| | | GalNAc4psGalNAc4psGalNAc4 | | | | | |
| 624 | 2163 | mApsmUpsmGmCf2PmUfUfGfGmU | 2203 | mCpsfApsmGmGmAfAmCmAmUmAm | 57 | | |
| | | mAmUmGmUmUmCmCmUmG- | | CmCmAfAmGfGmCmAmUpsmUpsmU | | | |
| | | GalNAc4psGalNAc4psGalNAc4 | | | | | |
| 625 | 2164 | mApsmUpsmGmCfCmUfUfGfGmUm | 2204 | mCpsfApsmGmGmAfAmCmAmUmAm | 54 | | |
| | | AmUmGmUmUmCmun34CmUmG- | | CmCmAfAmGfGmCmAmUpsmUpsmU | | | |
| | | GalNAc4psGalNAc4psGalNAc4 | | | | | |
| 614 | 2153 | mApsmUpsmGmCfCmUfUfGfGmUm | 2193 | mCpsfApsmGmGmAfAmCmAmUmAm | 71 | | |
| | | AmUmGmUmUmCmCmUmG-p- | | CmCmAfAmGfGmCmAmUpsmCpsmC | | | |
| | | (ps)2-GalNAc4 | | | | | |
| 671(601) | 2299 | mGpsmUpsmCmGmUmGfGmAfUfGf | 2323 | mApsfCpsmAmUmAfCmCmAmAmGm | 77 | | |
| | | CmCmUmUmGmGmUmAmUmGmU- | | GmCmAfUmCfCmAmCmGmAmCpsm | | | |
| | | p-(ps)2-GalNAc4 | | UpsmU | | | |

*indicates average value over more than one trial

[0620] Still additional modified siRNA duplexes were tested at a dose of 0.5 mg/kg or 5 mg/kg in accordance with the procedure outlined above, except that treatment was on Day 0 and the animals were sacrificed on Day 10 (240 hours post-dose). The results are shown in Table 6 and FIGS. 12-16.

TABLE 6
Modified siRNA Sequences Used for Further In Vivo Study

| siRNA | | | | | | |
|---|---|---|---|---|---|---|
| Duplex ID | SEQ | Sense Strand Base Sequence + | SEQ | Antisense Strand Base Sequence + | %RNA Inhibition (Drug v. Vehicle) | |
| No. (MDx) | ID NO | Modifications (5′-3′) | ID NO | Modifications (5′-3′) | 0.5 mg/kg | 5 mg/kg |
| 615 | 2154 | mApsmUpsmGmCfCmUfUfGfGmUmA | 2194 | mApsfApsmGmGmAfAmCmAmUmAmC | 70 | 79* |
| | | mUmGmUmUmCmCmUmG-p-(ps)2- | | mCmAfAmGfGmCmAmUpsmCpsmC | | |
| | | GalNAc4 | | | | |
| 626 | 2165 | mApsmUpsmGmCfCmUfUfGfGmUmA | 2205 | d2vmApsfApsmGmGmAfAmCmAmUmA | 72 | 74 |
| | | mUmGmUmUmCmCmUmG- | | mCmCmAfAmGfGmCmAmUpsmCpsmC | | |
| | | GalNAc4psGalNAc4psGalNAc4 | | | | |
| 628 | 2167 | mApsmUpsmGmCf2PmUfUfGfGmUm | 2207 | d2vmApsfApsmGmGmAfAmCmAmUmA | 67 | |
| | | AmUmGmUmUmCmCmUmG- | | mCmCmAfAmGfGmCmAmUpsmCpsmC | | |
| | | GalNAc4psGalNAc4psGalNAc4 | | | | |
| 627 | 2166 | mApsmUpsmGmCf2PmUfUfGfGmUm | 2206 | mApsfApsmGmGmAfAmCmAmUmAmC | 73 | |
| | | AmUmGmUmUmCmCmUmG- | | mCmAfAmGfGmCmAmUpsmCpsmC | | |
| | | GalNAc4psGalNAc4psGalNAc4 | | | | |
| 629 | 2168 | mApsmUpsmGmCfCmUfUfGfGmUmA | 2208 | d2vmApsfApsmGmGmAfAmCmAmUmA | 66 | |
| | | mUmGmUmUmCmun34CmUmG-p- | | mCmCmAfAmGfGmCmAmUpsmCpsmC | | |
| | | (ps)2-GalNAc4 | | | | |
| 630 | 2169 | GalNAc4-(ps)2-p- | 2209 | mApsfApsmGmGmAfAmCmAmUmAmC | 53 | |
| | | mAmUmGmCfCmUfUfGfGmUmAmU | | mCmAfAmGfGmCmAmUpsmCpsmC | | |
| | | mGmUmUmCmCmUmG-p-(ps)2- | | | | |
| | | GalNAc4 | | | | |
| 616 | 2155 | mApsmUpsmGmCmCmUfUmGfGfUfA | 2195 | mApsfGpsmCmAmGfGmAmAmCmAmU | −17 | |
| | | mUmGmUmUmCmCmUmGmCmU-p- | | mAmCfCmAfAmGmGmCmAmUpsmCps | | |
| | | (ps)2-GalNAc4 | | mC | | |
| 631 | 2170 | mApsmUpsmGmCfCmUfUfGfGmUmA | 2210 | c20- | 74 | |
| | | mUmGmUmUmCmCmUmG-p-(ps)2- | | 4hUpsfApsmGmGmAfAmCmAmUmAmC | | |
| | | GalNAc4 | | mCmAfAmGfGmCmAmUpsmCpsmC | | |
| 632 | 2171 | mGpsmGpsmAmUmGmCfCmUfUfGfG | 2211 | mApsfApsmGmGmAfAmCmAmUmAmC | 58 | |
| | | mUmAmUmGmUmUmCmCmUmG-p- | | mCmAfAmGfGmCmAmUmCmCpsmAps | | |
| | | (ps)2-GalNAc4 | | mC | | |
| 662(602) | 2291 | mGpsmUpsmCmGmUmGfGmAfUfGfC | 2315 | vmApsfCpsmAmUmAfCmCmAmAmGm | 59 | |
| | | mCmUmUmGmGmUmAmUmGmU-p- | | GmCmAfUmCfCmAmCmGmAmCpsmUp | | |
| | | (ps)2-GalNAc4 | | smU | | |
| 647 | 2186 | mUpsmCpsmGmUmGmGfAmUfGfCfC | 2226 | mApsfApsmCmAmUfAmCmCmAmAmG | 59 | |
| | | mUmUmGmGmUmAmUmGmUmU-p- | | mGmCfAmUfCmCmAmCmGmApsmCps | | |
| | | (ps)2-GalNAc4 | | mU | | |
| 648 | 2187 | mApsmGpsmUmCmGmUfGmGfAfUfG | 2227 | mApsfApsmUmAmCfCmAmAmGmGmC | 57 | |
| | | mCmCmUmUmGmGmUmAmUmG-p- | | mAmUfCmCfAmCmGmAmCmUpsmUps | | |
| | | (ps)2-GalNAc4 | | mC | | |
| 635 | 2174 | mGpsmUpsmGmUmCmUfGmAfCfUfU | 2214 | vmUpsfUpsmUmGmGfAmCmCmGmAm | 35 | |
| | | mUmCmGmGmUmCmCmAmAmA-p- | | AmAmGfUmCfAmGmAmCmAmCpsmCp | | |
| | | (ps)2-GalNAc4 | | smA | | |
| 636 | 2175 | mGpsmUpsmGmUmCmUfGmAfCfUfU | 2215 | vmApsfUpsmUmGmGfAmCmCmGmAm | 56 | |
| | | mUmCmGmGmUmCmCmAmAmA-p- | | AmAmGfUmCfAmGmAmCmAmCpsmCp | | |
| | | (ps)2-GalNAc4 | | smA | | |
| 637 | 2176 | mGpsmUpsmGmUmCmUfGmAfCfUfU | 2216 | mApsfUpsmUmGmGfAmCmCmGmAmA | 52 | |
| | | mUmCmGmGmUmCmCmAmAmA-p- | | mAmGfUmCfAmGmAmCmAmCpsmCps | | |
| | | (ps)2-GalNAc4 | | mA | | |
| 639 | 2178 | mUpsmCpsmCmAmAmAfGmAfCfGfA | 2218 | vmUpsfUpsmCmCmAfCmGmAmCmUm | 57 | |
| | | mAmGmUmCmGmUmGmGmAmU-p- | | UmCmGfUmCfUmUmUmGmGmApsmC | | |
| | | (ps)2-GalNAc4 | | psmC | | |
| 640 | 2179 | mUpsmCpsmCmAmAmAfGmAfCfGfA | 2219 | mUpsfUpsmCmCmAfCmGmAmCmUmU | 34 | |
| | | mAmGmUmCmGmUmGmGmAmU-p- | | mCmGfUmCfUmUmUmGmGmApsmCps | | |
| | | (ps)2-GalNAc4 | | mC | | |
| 642 | 2181 | mApsmUpsmGmCmCmAfAmAfAfCfA | 2221 | vmApsfGpsmGmUmGfAmUmGmGmUm | 58 | |
| | | mAmCmCmAmUmCmAmCmCmG-p- | | UmGmUfUmUfUmGmGmCmAmUpsmC | | |
| | | (ps)2-GalNAc4 | | psmA | | |
| 643 | 2182 | mApsmUpsmGmCmCmAfAmAfAfCfA | 2222 | mApsfGpsmGmUmGfAmUmGmGmUm | 51 | |
| | | mAmCmCmAmUmCmAmCmCmG-p- | | UmGmUfUmUfUmGmGmCmAmUpsmC | | |
| | | (ps)2-GalNAc4 | | psmA | | |
| 644 | 2183 | mGpsmApsmAmGmUmCfGmUfGfGfA | 2223 | vmUpsfApsmCmCmAfAmGmGmCmAm | 69 | |
| | | mUmGmCmCmUmUmGmGmUmA-p- | | UmCmCfAmCfGmAmCmUmUmCpsmGp | | |
| | | (ps)2-GalNAc4 | | smU | | |
| 645 | 2184 | mGpsmApsmAmGmUmCfGmUfGfGfA | 2224 | vmApsfApsmCmCmAfAmGmGmCmAm | 73 | |
| | | mUmGmCmCmUmUmGmGmUmA-p- | | UmCmCfAmCfGmAmCmUmUmCpsmGp | | |
| | | (ps)2-GalNAc4 | | smU | | |
| 646 | 2185 | mGpsmApsmAmGmUmCfGmUfGfGfA | 2225 | mApsfApsmCmCmAfAmGmGmCmAmU | 62 | 78 |
| | | mUmGmCmCmUmUmGmGmUmA-p- | | mCmCfAmCfGmAmCmUmUmCpsmGps | | |
| | | (ps)2-GalNAc4 | | mU | | |
| 620 | 2159 | mApsmUpsmGmCfCmUfUfGfGmUmU | 2199 | d2vmApsfApsmGmGmAfAmCmAmAmA | 57 | |
| | | mUmGmUmUmCmCmUmG-p-(ps)2- | | mCmCmAfAmGfGmCmAmUpsmCpsmC | | |
| | | GalNAc4 | | | | |
| 657 | 2286 | mGpsmApsmAmGmUmCfGmUfGfGfC | 2310 | vmApsfApsmCmCmAfAmGmGmCmAm | 63 | 77 |
| | | mUmGmCmCmUmUmGmGmUmA-p- | | UmCmCfAmCfGmAmCmUmUmCpsmGp | | |
| | | (ps)2-GalNAc4 | | smU | | |
| 660 | 2289 | mGpsmApsmAmGmUmCfGmUfGfGfC | 2313 | mApsfApsmCmCmAfAmGmGmCmAmU | 38 | 58 |
| | | mUmGmCmCmUmUmGmGmUmA-p- | | mCmCfAmCfGmAmCmUmUmCpsmGps | | |
| | | (ps)2-GalNAc4 | | mU | | |
| 654 | 2283 | mGpsmApsmAmGmUmCfGmUfGfGfA | 2307 | c20- | 39 | 69 |
| | | mUmGmCmCmUmUmGmGmUmA-p- | | 4hUpsfApsmCmCmAfAmGmGmCmAmU | | |
| | | (ps)2-GalNAc4 | | mCmCfAmCfGmAmCmUmUmCpsmGps | | |
| | | | | mU | | |
| 655 | 2284 | mGpsmApsmAmGmUmCfGmUfGfGfA | 2308 | vmApsfApsmCmCmAfAunGmGmCmAm | 38 | 67 |
| | | mUmGmCmCmUmUmGmGmUmA-p- | | UmCmCfAmCfGmAmCmUmUmCpsmGp | | |
| | | (ps)2-GalNAc4 | | smU | | |
| 673(596) | 2301 | mGpsmApsmAmGmUmCfGmUfGfGfA | 2325 | vmUpsfApsmCmCmAfAmGmGmCmAm | 52 | 73 |
| | | mUmGmCmCmUmUmGmGmUmA-p- | | UmCmCfAmCfGmAmCmUmUmCpsmUp | | |
| | | (ps)2-GalNAc4 | | smU | | |
| 656 | 2285 | mGpsmApsmAmGmUmCfGmUfGfGfA | 2309 | vmApsfApsmCmCmAfAmGmGmCmAm | 51 | 74 |
| | | mUmGmCmCmUmUmGmGmUmU-p- | | UmCmCfAmCfGmAmCmUmUmCpsmGp | | |
| | | (ps)2-GalNAc4 | | smU | | |
| 658 | 2287 | mGpsmApsmAmGmUmCfGmUfGfGfA | 2311 | vmApsfApsmCmCmAfAmGmGmCmAm | 53 | 75 |
| | | mUmGmCmCmUmUmGmun34GmU | | UmCmCfAmCfGmAmCmUmUmCpsmGp | | |
| | | mA-p-(ps)2-GalNAc4 | | smU | | |
| 659 | 2288 | mGpsmApsmAmGmUmCfGmUfGfGfA | 2312 | mApsfApsmCmCmAfAmGmGmCmAmU | 61 | 72 |
| | | mUmGmCmCmUmUmGmGmUmU-p- | | mCmCfAmCfGmAmCmUmUmCpsmGps | | |
| | | (ps)2-GalNAc4 | | mU | | |
| 650 | 2279 | mApsmUpsmGmCmCmAfAmAfAf2PfA | 2303 | vmApsfGpsmGmUmGfAmUmGmGmUm | 61 | 72 |
| | | mAmCmCmAmUmCmAmCmCmG-p- | | UmGmUfUmUfUmGmGmCmAmUpsmC | | |
| | | (ps)2-GalNAc4 | | psmA | | |
| 652 | 2281 | mApsmUpsmGmCmCmAfAmAfAfCfA | 2305 | vmApsfGpsmGmUmGfAmUmGmGmUm | 55 | 79 |
| | | mAmCmCmAmUmCmAmCmCmU-p- | | UmGmUfUmUfUmGmGmCmAmUpsmC | | |
| | | (ps)2-GalNAc4 | | psmA | | |
| 686 | 2338 | mUpsmApsmCmCmAmGfAmGfUfGfU | 2352 | vmUpsfCpsmCmCmCfAmUmCmAmGmA | 19 | |
| | | mCmUmGmAmUmGmGmGmGmA-p- | | mCmAfCmUfCmUmGmGmUmApsmAps | | |
| | | (ps)2GalNAc | | mG | | |
| 653 | 2282 | mApsmUpsmGmCmCmAfAmAfAf2PfA | 2306 | vmApsfGpsmGmUmGfAmUmGmGmUm | 14 | |
| | | mAmCmCmAmUmCmAmCmCmU-p- | | UmGmUfUmUfUmGmGmCmAmUpsmC | | |
| | | (ps)2-GalNAc4 | | psmA | | |
| 687 | 2339 | mCpsmGpsmAmCmAmUfCmUfGfCfC | 2353 | vmUpsfUpsmGmAmCfUmUmUmAmGm | 58 | |
| | | mCmUmAmAmAmGmUmCmAmA-p- | | GmGmCfAmGfAmUmGmUmCmGpsmU | | |
| | | (ps)2GalNAc | | psmA | | |
| 674 | 2326 | mApsmCpsmAmUfCmUfGfCfCmCmU | 2340 | mUpsfUpsmGmAmCfUmUmUmAmGmG | 60 | |
| | | mAmAmAmGmUmCmAmA-p-(ps)2- | | mGmCfAmGfAmUmGmUpsmCpsmG | | |
| | | GalNAc4 | | | | |
| 675 | 2327 | mApsmCpsmAmUfCmUfGfCfCmCmU | 2341 | vmUpsfUpsmGmAmCfUmUmUmAmGm | 55 | |
| | | mAmAmAmGmUmCmAmA-p-(ps)2- | | GmGmCfAmGfAmUmGmUpsmCpsmG | | |
| | | GalNAc4 | | | | |
| 677 | 2329 | mApsmCpsmAmUfCmUfGfCfCmCmU | 2343 | vmApsfUpsmGmAmCfUmUmUmAmGm | 66 | |
| | | mAmAmAmGmUmCmAmA-p-(ps)2- | | GmGmCfAmGfAmUmGmUpsmCpsmG | | |
| | | GalNAc4 | | | | |
| 679 | 2331 | mApsmCpsmAmUf2PmUfGfCfCmCmU | 2345 | vmUpsfUpsmGmAmCfUmUmUmAmGm | 47 | |
| | | mAmAmAmGmUmCmAmA-p-(ps)2- | | GmGmCfAmGfAmUmGmUpsmCpsmG | | |
| | | GalNAc4 | | | | |
| 681 | 2333 | mApsmCpsmAmUfCmUfGfCf2PmCmU | 2347 | vmUpsfUpsmGmAmCfUmUmUmAmGm | 60 | |
| | | mAmAmAmGmUmCmAmA-p-(ps)2- | | GmGmCfAmGfAmUmGmUpsmCpsmG | | |
| | | GalNAc4 | | | | |
| 683 | 2335 | mGpsmCpsmCmUfGmUfGfGfAmAmU | 2349 | vmApsfApsmUmGmGfCmAmGmAmUm | 40 | |
| | | mCmUmGmCmCmAmUmU-p-(ps)2- | | UmCmCfAmCfAmGmGmCpsmApsmG | | |
| | | GalNAc4 | | | | |

*indicates average value over more than one trial

The application's sequence listing, which the Patent Office published only in electronic form, follows.

SEQUENCE LISTING (2366 sequences)

SEQ ID NO: 1 - DNA, 2753 bp, Homo sapiens
  source 1..2753: mol_type = genomic DNA
agagagcgcttgcgggcgccgggcggagctgctgcggatcaggacccgagccgattcccgatcccgacccagatcctaacccgcgcccccgccccgccgccgccgccatgtacgacgcagagcgcggctggagcttgtccttcgcgggctgcggcttcctgggcttctaccacgtcggggcgacccgctgcctgagcgagcacgccccgcacctcctccgcgacgcgcgcatgttgttcggcgcttcggccggggcgttgcactgcgtcggcgtcctctccggtatcccgctggagcagactctgcaggtcctctcagatcttgtgcggaaggccaggagtcggaacattggcatcttccatccatccttcaacttaagcaagttcctccgacagggtctctgcaaatgcctcccggccaatgtccaccagctcatctccggcaaaataggcatctctcttaccagagtgtctgatggggaaaacgttctggtgtctgactttcggtccaaagacgaagtcgtggatgccttggtatgttcctgcttcatccccttctacagtggccttatccctccttccttcagaggcgtgcgatatgtggatggaggagtgagtgacaacgtacccttcattgatgccaaaacaaccatcaccgtgtcccccttctatggggagtacgacatctgccctaaagtcaagtccacgaactttcttcatgtggacatcaccaagctcagtctacgcctctgcacagggaacctctaccttctctcgagagcttttgtccccccggatctcaaggtgctgggagagatatgccttcgaggatatttggatgcattcaggttcttggaagagaagggcatctgcaacaggccccagccaggcctgaagtcatcctcagaagggatggatcctgaggtcgccatgcccagctgggcaaacatgagtctggattcttccccggagtcggctgccttggctgtgaggctggagggagatgagctgctagaccacctgcgtctcagcatcctgccctgggatgagagcatcctggacaccctctcgcccaggctcgctacagcactgagtgaagaaatgaaagacaaaggtggatacatgagcaagatttgcaacttgctacccattaggataatgtcttatgtaatgctgccctgtaccctgcctgtggaatctgccattgcgattgtccagagactggtgacatggcttccagatatgcccgacgatgtcctgtggttgcagtgggtgacctcacaggtgttcactcgagtgctgatgtgtctgctccccgcctccaggtcccaaatgccagtgagcagccaacaggcctccccatgcacacctgagcaggactggccctgctggactccctgctcccccaagggctgtccagcagagaccaaagcagaggccaccccgcggtccatcctcaggtccagcctgaacttcttcttgggcaataaagtacctgctggtgctgaggggctctccacctttcccagtttttcactagagaagagtctgtgagtcacttgaggaggcgagtctagcagattctttcagaggtgctaaagtttcccatctttgtgcagctacctccgcattgctgtgtagtgacccctgcctgtgacgtggaggatcccagcctctgagctgagttggttttatgaaaagctaggaagcaacctttcgcctgtgcagcggtccagcacttaactctaatacatcagcatgcgttaattcagctggttgggaaatgacaccaggaagcccagtgcagagggtcccttactgactgtttcgtggccctattaatggtcagactgttccagcatgaggttcttagaatgacaggtgtttggatgggtgggggccttgtgatggggggtaggctggcccatgtgtgatcttgtggggtggagggaagagaatagcatgatcccacttccccatgctgtgggaaggggtgcagttcgtccccaagaacgacactgcctgtcaggtggtctgcaaagatgataaccttgactactaaaaacgtctccatggcgggggtaacaagatgataatctacttaattttagaacacctttttcacctaactaaaataatgtttaaagagttttgtataaaaatgtaaggaagcgttgttacctgttgaattttgtattatgtgaatcagtgagatgttagtagaataagccttaaaaaaaaaaaaatcggttgggtgcagtggcacacggctgtaatcccagcactttgggaggccaaggttggcagatcacctgaggtcaggagttcaagaccagtctggccaacatagcaaaaccctgtctctactaaaaatacaaaaattatctgggcatggtggtgcatgcctgtaatcccagctattcggaaggctgaggcaggagaatcacttgaacccaggaggcggaggttgcggtgagctgagattgcaccatttcattccagcctgggcaacatgagtgaaagtctgactcaaaaaaaaaaaatttaaaaaacaaaataatctagtgtgcagggcattcacctcagccccccaggcaggagccaagcacagcaggagcttccgcctcctctccactggagcacacaacttgaacctggcttattttctgcagggaccagccccacatggtcagtgagtttctccccatgtgtggcgatgagagagtgtagaaataaagacacaagacaaagaga

SEQ ID NO: 2 - protein, 481 aa, Homo sapiens
MYDAERGWSLSFAGCGFLGFYHVGATRCLSEHAPHLLRDARMLFGASAGALHCVGVLSGIPLEQTLQVLSDLVRKARSRNIGIFHPSFNLSKFLRQGLCKCLPANVHQLISGKIGISLTRVSDGENVLVSDFRSKDEVVDALVCSCFIPFYSGLIPPSFRGVRYVDGGVSDNVPFIDAKTTITVSPFYGEYDICPKVKSTNFLHVDITKLSLRLCTGNLYLLSRAFVPPDLKVLGEICLRGYLDAFRFLEEKGICNRPQPGLKSSSEGMDPEVAMPSWANMSLDSSPESAALAVRLEGDELLDHLRLSILPWDESILDTLSPRLATALSEEMKDKGGYMSKICNLLPIRIMSYVMLPCTLPVESAIAIVQRLVTWLPDMPDDVLWLQWVTSQVFTRVLMCLLPASRSQMPVSSQQASPCTPEQDWPCWTPCSPKGCPAETKAEATPRSILRSSLNFFLGNKVPAGAEGLSTFPSFSLEKSL

SEQ ID NO: 3 - RNA, 21 nt, synthetic construct
  source 1..21: mol_type = other RNA
atgtacgacgcagagcgcgtt

SEQ ID NO: 4 - RNA, 21 nt, synthetic construct
  source 1..21: mol_type = other RNA
tgtacgacgcagagcgcggtt

SEQ ID NO: 5 - RNA, 21 nt, synthetic construct
  source 1..21: mol_type = other RNA
gtacgacgcagagcgcggctt

SEQ ID NO: 6 - RNA, 21 nt, synthetic construct
  source 1..21: mol_type = other RNA
acgacgcagagcgcggctgtt

SEQ ID NO: 7 - RNA, 21 nt, synthetic construct
  source 1..21: mol_type = other RNA
cgacgcagagcgcggctggtt

SEQ ID NO: 8 - RNA, 21 nt, synthetic construct
  source 1..21: mol_type = other RNA
gacgcagagcgcggctggatt

SEQ ID NO: 9 - RNA, 21 nt, synthetic construct
  source 1..21: mol_type = other RNA
gcagagcgcggctggagcttt

SEQ ID NO: 10 - RNA, 21 nt, synthetic construct
  source 1..21: mol_type = other RNA
cagagcgcggctggagctttt

SEQ ID NO: 11 - RNA, 21 nt, synthetic construct
  source 1..21: mol_type = other RNA
agagcgcggctggagcttgtt

SEQ ID NO: 12 - RNA, 21 nt, synthetic construct
  source 1..21: mol_type = other RNA
gagcgcggctggagcttgttt

SEQ ID NO: 13 - RNA, 21 nt, synthetic construct
  source 1..21: mol_type = other RNA
gcgcggctggagcttgtcctt

SEQ ID NO: 14 - RNA, 21 nt, synthetic construct
  source 1..21: mol_type = other RNA
cgcggctggagcttgtccttt

SEQ ID NO: 15 - RNA, 21 nt, synthetic construct
  source 1..21: mol_type = other RNA
gcggctggagcttgtcctttt

SEQ ID NO: 16 - RNA, 21 nt, synthetic construct
  source 1..21: mol_type = other RNA
gctggagcttgtccttcgctt

SEQ ID NO: 17 - RNA, 21 nt, synthetic construct
  source 1..21: mol_type = other RNA
tggagcttgtccttcgcggtt

SEQ ID NO: 18 - RNA, 21 nt, synthetic construct
  source 1..21: mol_type = other RNA
ggagcttgtccttcgcgggtt

SEQ ID NO: 19 - RNA, 21 nt, synthetic construct
  source 1..21: mol_type = other RNA
gagcttgtccttcgcgggctt

SEQ ID NO: 20 - RNA, 21 nt, synthetic construct
  source 1..21: mol_type = other RNA
agcttgtccttcgcgggcttt

SEQ ID NO: 21 - RNA, 21 nt, synthetic construct
  source 1..21: mol_type = other RNA
gtccttcgcgggctgcggctt

SEQ ID NO: 22 - RNA, 21 nt, synthetic construct
  source 1..21: mol_type = other RNA
gctgcggcttcctgggctttt

SEQ ID NO: 23 - RNA, 21 nt, synthetic construct
  source 1..21: mol_type = other RNA
ctgcggcttcctgggcttctt

SEQ ID NO: 24 - RNA, 21 nt, synthetic construct
  source 1..21: mol_type = other RNA
cggcttcctgggcttctactt

SEQ ID NO: 25 - RNA, 21 nt, synthetic construct
  source 1..21: mol_type = other RNA
ctgggcttctaccacgtcgtt

SEQ ID NO: 26 - RNA, 21 nt, synthetic construct
  source 1..21: mol_type = other RNA
tgggcttctaccacgtcggtt

SEQ ID NO: 27 - RNA, 21 nt, synthetic construct
  source 1..21: mol_type = other RNA
ggcttctaccacgtcggggtt

SEQ ID NO: 28 - RNA, 21 nt, synthetic construct
  source 1..21: mol_type = other RNA
gcttctaccacgtcggggctt

SEQ ID NO: 29 - RNA, 21 nt, synthetic construct
  source 1..21: mol_type = other RNA
cttctaccacgtcggggcgtt

SEQ ID NO: 30 - RNA, 21 nt, synthetic construct
  source 1..21: mol_type = other RNA
ttctaccacgtcggggcgatt

SEQ ID NO: 31 - RNA, 21 nt, synthetic construct
  source 1..21: mol_type = other RNA
tctaccacgtcggggcgactt

SEQ ID NO: 32 - RNA, 21 nt, synthetic construct
  source 1..21: mol_type = other RNA
ctaccacgtcggggcgacctt

SEQ ID NO: 33 - RNA, 21 nt, synthetic construct
  source 1..21: mol_type = other RNA
accacgtcggggcgacccgtt

SEQ ID NO: 34 - RNA, 21 nt, synthetic construct
  source 1..21: mol_type = other RNA
ctgcctgagcgagcacgcctt

SEQ ID NO: 35 - RNA, 21 nt, synthetic construct
  source 1..21: mol_type = other RNA
tgcctgagcgagcacgccctt

SEQ ID NO: 36 - RNA, 21 nt, synthetic construct
  source 1..21: mol_type = other RNA
cctgagcgagcacgccccgtt

SEQ ID NO: 37 - RNA, 21 nt, synthetic construct
  source 1..21: mol_type = other RNA
gagcgagcacgccccgcactt

SEQ ID NO: 38 - RNA, 21 nt, synthetic construct
  source 1..21: mol_type = other RNA
agcgagcacgccccgcacctt

SEQ ID NO: 39 - RNA, 21 nt, synthetic construct
  source 1..21: mol_type = other RNA
gagcacgccccgcacctcctt

SEQ ID NO: 40 - RNA, 21 nt, synthetic construct
  source 1..21: mol_type = other RNA
ccccgcacctcctccgcgatt

SEQ ID NO: 41 - RNA, 21 nt, synthetic construct
  source 1..21: mol_type = other RNA
cccgcacctcctccgcgactt

SEQ ID NO: 42 - RNA, 21 nt, synthetic construct
  source 1..21: mol_type = other RNA
ccgcacctcctccgcgacgtt

SEQ ID NO: 43 - RNA, 21 nt, synthetic construct
  source 1..21: mol_type = other RNA
cgcacctcctccgcgacgctt

SEQ ID NO: 44 - RNA, 21 nt, synthetic construct
  source 1..21: mol_type = other RNA
cctcctccgcgacgcgcgctt

SEQ ID NO: 45 - RNA, 21 nt, synthetic construct
  source 1..21: mol_type = other RNA
ctcctccgcgacgcgcgcatt

SEQ ID NO: 46 - RNA, 21 nt, synthetic construct
  source 1..21: mol_type = other RNA
tcctccgcgacgcgcgcattt

SEQ ID NO: 47 - RNA, 21 nt, synthetic construct
  source 1..21: mol_type = other RNA
cctccgcgacgcgcgcatgtt

SEQ ID NO: 48 - RNA, 21 nt, synthetic construct
  source 1..21: mol_type = other RNA
ctccgcgacgcgcgcatgttt

SEQ ID NO: 49 - RNA, 21 nt, synthetic construct
  source 1..21: mol_type = other RNA
tccgcgacgcgcgcatgtttt

SEQ ID NO: 50 - RNA, 21 nt, synthetic construct
  source 1..21: mol_type = other RNA
ccgcgacgcgcgcatgttgtt

SEQ ID NO: 51 - RNA, 21 nt, synthetic construct
  source 1..21: mol_type = other RNA
cgcgacgcgcgcatgttgttt

SEQ ID NO: 52 - RNA, 21 nt, synthetic construct
  source 1..21: mol_type = other RNA
gcgacgcgcgcatgttgtttt

SEQ ID NO: 53 - RNA, 21 nt, synthetic construct
  source 1..21: mol_type = other RNA
gacgcgcgcatgttgttcgtt

SEQ ID NO: 54 - RNA, 21 nt, synthetic construct
  source 1..21: mol_type = other RNA
acgcgcgcatgttgttcggtt

SEQ ID NO: 55 - RNA, 21 nt, synthetic construct
  source 1..21: mol_type = other RNA
cgcgcgcatgttgttcggctt

SEQ ID NO: 56 - RNA, 21 nt, synthetic construct
  source 1..21: mol_type = other RNA
gcgcgcatgttgttcggcgtt

SEQ ID NO: 57 - RNA, 21 nt, synthetic construct
  source 1..21: mol_type = other RNA
ttgttcggcgcttcggccgtt

SEQ ID NO: 58 - RNA, 21 nt, synthetic construct
  source 1..21: mol_type = other RNA
tgttcggcgcttcggccggtt

SEQ ID NO: 59 - RNA, 21 nt, synthetic construct
  source 1..21: mol_type = other RNA
tcggccggggcgttgcacttt

SEQ ID NO: 60 - RNA, 21 nt, synthetic construct
  source 1..21: mol_type = other RNA
cttgtgcggaaggccaggatt

SEQ ID NO: 61 - RNA, 21 nt, synthetic construct
  source 1..21: mol_type = other RNA
tgtgcggaaggccaggagttt

SEQ ID NO: 62 - RNA, 21 nt, synthetic construct
  source 1..21: mol_type = other RNA
tgcggaaggccaggagtcgtt

SEQ ID NO: 63 - RNA, 21 nt, synthetic construct
  source 1..21: mol_type = other RNA
cggaaggccaggagtcggatt

SEQ ID NO: 64 - RNA, 21 nt, synthetic construct
  source 1..21: mol_type = other RNA
aaggccaggagtcggaacatt

SEQ ID NO: 65 - RNA, 21 nt, synthetic construct
  source 1..21: mol_type = other RNA
aggccaggagtcggaacattt

SEQ ID NO: 66 - RNA, 21 nt, synthetic construct
  source 1..21: mol_type = other RNA
ggccaggagtcggaacatttt

SEQ ID NO: 67 - RNA, 21 nt, synthetic construct
  source 1..21: mol_type = other RNA
caggagtcggaacattggctt

SEQ ID NO: 68 - RNA, 21 nt, synthetic construct
  source 1..21: mol_type = other RNA
aggagtcggaacattggcatt

SEQ ID NO: 69 - RNA, 21 nt, synthetic construct
  source 1..21: mol_type = other RNA
cggaacattggcatcttcctt

SEQ ID NO: 70 - RNA, 21 nt, synthetic construct
  source 1..21: mol_type = other RNA
aacattggcatcttccatctt

SEQ ID NO: 71 - RNA, 21 nt, synthetic construct
  source 1..21: mol_type = other RNA
acattggcatcttccatcctt

SEQ ID NO: 72 - RNA, 21 nt, synthetic construct
  source 1..21: mol_type = other RNA
tccttcaacttaagcaagttt

SEQ ID NO: 73 - RNA, 21 nt, synthetic construct
  source 1..21: mol_type = other RNA
cttcaacttaagcaagttctt

SEQ ID NO: 74 - RNA, 21 nt, synthetic construct
  source 1..21: mol_type = other RNA
gcctcccggccaatgtccatt

SEQ ID NO: 75 - RNA, 21 nt, synthetic construct
  source 1..21: mol_type = other RNA
cctcccggccaatgtccactt

SEQ ID NO: 76 - RNA, 21 nt, synthetic construct
  source 1..21: mol_type = other RNA
ccaatgtccaccagctcattt

SEQ ID NO: 77 - RNA, 21 nt, synthetic construct
  source 1..21: mol_type = other RNA
aatgtccaccagctcatcttt

SEQ ID NO: 78 - RNA, 21 nt, synthetic construct
  source 1..21: mol_type = other RNA
atgtccaccagctcatctctt

SEQ ID NO: 79 - RNA, 21 nt, synthetic construct
  source 1..21: mol_type = other RNA
gtccaccagctcatctccgtt

SEQ ID NO: 80 - RNA, 21 nt, synthetic construct
  source 1..21: mol_type = other RNA
tccaccagctcatctccggtt

SEQ ID NO: 81 - RNA, 21 nt, synthetic construct
  source 1..21: mol_type = other RNA
ccagctcatctccggcaaatt

SEQ ID NO: 82 - RNA, 21 nt, synthetic construct
  source 1..21: mol_type = other RNA
ggcatctctcttaccagagtt

SEQ ID NO: 83 - RNA, 21 nt, synthetic construct
  source 1..21: mol_type = other RNA
tcttaccagagtgtctgattt

SEQ ID NO: 84 - RNA, 21 nt, synthetic construct
  source 1..21: mol_type = other RNA
cttaccagagtgtctgatgtt

SEQ ID NO: 85 - RNA, 21 nt, synthetic construct
  source 1..21: mol_type = other RNA
ttaccagagtgtctgatggtt

SEQ ID NO: 86 - RNA, 21 nt, synthetic construct
  source 1..21: mol_type = other RNA
taccagagtgtctgatgggtt

SEQ ID NO: 87 - RNA, 21 nt, synthetic construct
  source 1..21: mol_type = other RNA
gagtgtctgatggggaaaatt

SEQ ID NO: 88 - RNA, 21 nt, synthetic construct
  source 1..21: mol_type = other RNA
gtgtctgatggggaaaacgtt

SEQ ID NO: 89 - RNA, 21 nt, synthetic construct
  source 1..21: mol_type = other RNA
tgtctgatggggaaaacgttt

SEQ ID NO: 90 - RNA, 21 nt, synthetic construct
  source 1..21: mol_type = other RNA
gtctgatggggaaaacgtttt

SEQ ID NO: 91 - RNA, 21 nt, synthetic construct
  source 1..21: mol_type = other RNA
tctgatggggaaaacgttctt

SEQ ID NO: 92 - RNA, 21 nt, synthetic construct
  source 1..21: mol_type = other RNA
ctgatggggaaaacgttcttt

SEQ ID NO: 93 - RNA, 21 nt, synthetic construct
  source 1..21: mol_type = other RNA
tgatggggaaaacgttctgtt

SEQ ID NO: 94 - RNA, 21 nt, synthetic construct
  source 1..21: mol_type = other RNA
gatggggaaaacgttctggtt

SEQ ID NO: 95 - RNA, 21 nt, synthetic construct
  source 1..21: mol_type = other RNA
tggggaaaacgttctggtgtt

SEQ ID NO: 96 - RNA, 21 nt, synthetic construct
  source 1..21: mol_type = other RNA
gggaaaacgttctggtgtctt

SEQ ID NO: 97 - RNA, 21 nt, synthetic construct
  source 1..21: mol_type = other RNA
ggaaaacgttctggtgtcttt

SEQ ID NO: 98 - RNA, 21 nt, synthetic construct
  source 1..21: mol_type = other RNA
aaacgttctggtgtctgactt

SEQ ID NO: 99 - RNA, 21 nt, synthetic construct
  source 1..21: mol_type = other RNA
aacgttctggtgtctgacttt

SEQ ID NO: 100 - RNA, 21 nt, synthetic construct
  source 1..21: mol_type = other RNA
acgttctggtgtctgactttt

SEQ ID NO: 101 - RNA, 21 nt, synthetic construct
  source 1..21: mol_type = other RNA
cgttctggtgtctgacttttt

SEQ ID NO: 102 - RNA, 21 nt, synthetic construct
  source 1..21: mol_type = other RNA
gttctggtgtctgactttctt

SEQ ID NO: 103 - RNA, 21 nt, synthetic construct
  source 1..21: mol_type = other RNA
ttctggtgtctgactttcgtt

SEQ ID NO: 104 - RNA, 21 nt, synthetic construct
  source 1..21: mol_type = other RNA
ctggtgtctgactttcggttt

SEQ ID NO: 105 - RNA, 21 nt, synthetic construct
  source 1..21: mol_type = other RNA
tggtgtctgactttcggtctt

SEQ ID NO: 106 - RNA, 21 nt, synthetic construct
  source 1..21: mol_type = other RNA
ggtgtctgactttcggtcctt

SEQ ID NO: 107 - RNA, 21 nt, synthetic construct
  source 1..21: mol_type = other RNA
gtgtctgactttcggtccatt

SEQ ID NO: 108 - RNA, 21 nt, synthetic construct
  source 1..21: mol_type = other RNA
tgtctgactttcggtccaatt

SEQ ID NO: 109 - RNA, 21 nt, synthetic construct
  source 1..21: mol_type = other RNA
gtctgactttcggtccaaatt

SEQ ID NO: 110 - RNA, 21 nt, synthetic construct
  source 1..21: mol_type = other RNA
ggtccaaagacgaagtcgttt

SEQ ID NO: 111 - RNA, 21 nt, synthetic construct
  source 1..21: mol_type = other RNA
gtccaaagacgaagtcgtgtt

SEQ ID NO: 112 - RNA, 21 nt, synthetic construct
  source 1..21: mol_type = other RNA
tccaaagacgaagtcgtggtt

SEQ ID NO: 113 - RNA, 21 nt, synthetic construct
  source 1..21: mol_type = other RNA
ccaaagacgaagtcgtggatt

SEQ ID NO: 114 - RNA, 21 nt, synthetic construct
  source 1..21: mol_type = other RNA
caaagacgaagtcgtggattt

SEQ ID NO: 115 - RNA, 21 nt, synthetic construct
  source 1..21: mol_type = other RNA
aagacgaagtcgtggatgctt

SEQ ID NO: 116 - RNA, 21 nt, synthetic construct
  source 1..21: mol_type = other RNA
agacgaagtcgtggatgcctt

SEQ ID NO: 117 - RNA, 21 nt, synthetic construct
  source 1..21: mol_type = other RNA
gacgaagtcgtggatgccttt

SEQ ID NO: 118 - RNA, 21 nt, synthetic construct
  source 1..21: mol_type = other RNA
acgaagtcgtggatgcctttt

SEQ ID NO: 119 - RNA, 21 nt, synthetic construct
  source 1..21: mol_type = other RNA
gaagtcgtggatgccttggtt

SEQ ID NO: 120 - RNA, 21 nt, synthetic construct
  source 1..21: mol_type = other RNA
aagtcgtggatgccttggttt

SEQ ID NO: 121 - RNA, 21 nt, synthetic construct
  source 1..21: mol_type = other RNA
gtcgtggatgccttggtattt

SEQ ID NO: 122 - RNA, 21 nt, synthetic construct
  source 1..21: mol_type = other RNA
tcgtggatgccttggtatgtt

SEQ ID NO: 123 - RNA, 21 nt, synthetic construct
  source 1..21: mol_type = other RNA
gtggatgccttggtatgtttt

SEQ ID NO: 124 - RNA, 21 nt, synthetic construct
  source 1..21: mol_type = other RNA
tggatgccttggtatgttctt

SEQ ID NO: 125 - RNA, 21 nt, synthetic construct
  source 1..21: mol_type = other RNA
ggatgccttggtatgttcctt

SEQ ID NO: 126 - RNA, 21 nt, synthetic construct
  source 1..21: mol_type = other RNA
atgccttggtatgttcctgtt

SEQ ID NO: 127 - RNA, 21 nt, synthetic construct
  source 1..21: mol_type = other RNA
gccttggtatgttcctgcttt

SEQ ID NO: 128 - RNA, 21 nt, synthetic construct
  source 1..21: mol_type = other RNA
atgttcctgcttcatgccctt

SEQ ID NO: 129 - RNA, 21 nt, synthetic construct
  source 1..21: mol_type = other RNA
ttcctgcttcatgcccttctt

SEQ ID NO: 130 - RNA, 21 nt, synthetic construct
  source 1..21: mol_type = other RNA
tcctgcttcatgcccttcttt

SEQ ID NO: 131 - RNA, 21 nt, synthetic construct
  source 1..21: mol_type = other RNA
tggccttatccctccttcctt

SEQ ID NO: 132 - RNA, 21 nt, synthetic construct
  source 1..21: mol_type = other RNA
ttatccctccttccttcagtt

SEQ ID NO: 133 - RNA, 21 nt, synthetic construct
  source 1..21: mol_type = other RNA
tatccctccttccttcagatt

SEQ ID NO: 134 - RNA, 21 nt, synthetic construct
  source 1..21: mol_type = other RNA
cctccttccttcagaggcgtt

SEQ ID NO: 135 - RNA, 21 nt, synthetic construct
  source 1..21: mol_type = other RNA
ctccttccttcagaggcgttt

SEQ ID NO: 136 - RNA, 21 nt, synthetic construct
  source 1..21: mol_type = other RNA
ccttccttcagaggcgtgctt

SEQ ID NO: 137 - RNA, 21 nt, synthetic construct
  source 1..21: mol_type = other RNA
cttccttcagaggcgtgcgtt

SEQ ID NO: 138 - RNA, 21 nt, synthetic construct
  source 1..21: mol_type = other RNA
ttccttcagaggcgtgcgatt

SEQ ID NO: 139 - RNA, 21 nt, synthetic construct
  source 1..21: mol_type = other RNA
tccttcagaggcgtgcgattt

SEQ ID NO: 140 - RNA, 21 nt, synthetic construct
  source 1..21: mol_type = other RNA
ccttcagaggcgtgcgatatt

SEQ ID NO: 141 - RNA, 21 nt, synthetic construct
  source 1..21: mol_type = other RNA
atatgtggatggaggagtgtt

SEQ ID NO: 142 - RNA, 21 nt, synthetic construct
  source 1..21: mol_type = other RNA
tggatggaggagtgagtgatt

SEQ ID NO: 143 - RNA, 21 nt, synthetic construct
  source 1..21: mol_type = other RNA
atggaggagtgagtgacaatt

SEQ ID NO: 144 - RNA, 21 nt, synthetic construct
  source 1..21: mol_type = other RNA
aggagtgagtgacaacgtatt

SEQ ID NO: 145 - RNA, 21 nt, synthetic construct
  source 1..21: mol_type = other RNA
ggagtgagtgacaacgtactt

SEQ ID NO: 146 - RNA, 21 nt, synthetic construct
  source 1..21: mol_type = other RNA
agtgagtgacaacgtaccctt

SEQ ID NO: 147 - RNA, 21 nt, synthetic construct
  source 1..21: mol_type = other RNA
gtgagtgacaacgtacccttt

SEQ ID NO: 148 - RNA, 21 nt, synthetic construct
  source 1..21: mol_type = other RNA
gagtgacaacgtacccttctt

SEQ ID NO: 149 - RNA, 21 nt, synthetic construct
  source 1..21: mol_type = other RNA
atgccaaaacaaccatcactt

SEQ ID NO: 150 - RNA, 21 nt, synthetic construct
  source 1..21: mol_type = other RNA
tgccaaaacaaccatcacctt

SEQ ID NO: 151 - RNA, 21 nt, synthetic construct
  source 1..21: mol_type = other RNA
gccaaaacaaccatcaccgtt

SEQ ID NO: 152 - RNA, 21 nt, synthetic construct
  source 1..21: mol_type = other RNA
aaaacaaccatcaccgtgttt

SEQ ID NO: 153 - RNA, 21 nt, synthetic construct
  source 1..21: mol_type = other RNA
aaacaaccatcaccgtgtctt

SEQ ID NO: 154 - RNA, 21 nt, synthetic construct
  source 1..21: mol_type = other RNA
acaaccatcaccgtgtccctt

SEQ ID NO: 155 - RNA, 21 nt, synthetic construct
  source 1..21: mol_type = other RNA
caaccatcaccgtgtcccctt

SEQ ID NO: 156 - RNA, 21 nt, synthetic construct
  source 1..21: mol_type = other RNA
aaccatcaccgtgtccccctt

SEQ ID NO: 157 - RNA, 21 nt, synthetic construct
  source 1..21: mol_type = other RNA
caccgtgtcccccttctattt

SEQ ID NO: 158 - RNA, 21 nt, synthetic construct
  source 1..21: mol_type = other RNA
accgtgtcccccttctatgtt

SEQ ID NO: 159 - RNA, 21 nt, synthetic construct
  source 1..21: mol_type = other RNA
gtgtcccccttctatggggtt

SEQ ID NO: 160 - RNA, 21 nt, synthetic construct
  source 1..21: mol_type = other RNA
tgtcccccttctatggggatt

SEQ ID NO: 161 - RNA, 21 nt, synthetic construct
  source 1..21: mol_type = other RNA
gtcccccttctatggggagtt

SEQ ID NO: 162 - RNA, 21 nt, synthetic construct
  source 1..21: mol_type = other RNA
tcccccttctatggggagttt

SEQ ID NO: 163 - RNA, 21 nt, synthetic construct
  source 1..21: mol_type = other RNA
cccttctatggggagtacgtt

SEQ ID NO: 164 - RNA, 21 nt, synthetic construct
  source 1..21: mol_type = other RNA
ccttctatggggagtacgatt

SEQ ID NO: 165 - RNA, 21 nt, synthetic construct
  source 1..21: mol_type = other RNA
ttctatggggagtacgacatt

SEQ ID NO: 166 - RNA, 21 nt, synthetic construct
  source 1..21: mol_type = other RNA
tctatggggagtacgacattt

SEQ ID NO: 167 - RNA, 21 nt, synthetic construct
  source 1..21: mol_type = other RNA
ctatggggagtacgacatctt

SEQ ID NO: 168 - RNA, 21 nt, synthetic construct
  source 1..21: mol_type = other RNA
tatggggagtacgacatcttt

SEQ ID NO: 169 - RNA, 21 nt, synthetic construct
  source 1..21: mol_type = other RNA
tacgacatctgccctaaagtt

SEQ ID NO: 170 - RNA, 21 nt, synthetic construct
  source 1..21: mol_type = other RNA
acgacatctgccctaaagttt

SEQ ID NO: 171 - RNA, 21 nt, synthetic construct
  source 1..21: mol_type = other RNA
cgacatctgccctaaagtctt

SEQ ID NO: 172 - RNA, 21 nt, synthetic construct
  source 1..21: mol_type = other RNA
gacatctgccctaaagtcatt

SEQ ID NO: 173 - RNA, 21 nt, synthetic construct
  source 1..21: mol_type = other RNA
acatctgccctaaagtcaatt

SEQ ID NO: 174 - RNA, 21 nt, synthetic construct
  source 1..21: mol_type = other RNA
catctgccctaaagtcaagtt

SEQ ID NO: 175 - RNA, 21 nt, synthetic construct
  source 1..21: mol_type = other RNA
atctgccctaaagtcaagttt

SEQ ID NO: 176 - RNA, 21 nt, synthetic construct
  source 1..21: mol_type = other RNA
ccctaaagtcaagtccacgtt

SEQ ID NO: 177 - RNA, 21 nt, synthetic construct
  source 1..21: mol_type = other RNA
cctaaagtcaagtccacgatt

SEQ ID NO: 178 - RNA, 21 nt, synthetic construct
  source 1..21: mol_type = other RNA
taaagtcaagtccacgaactt

SEQ ID NO: 179 - RNA, 21 nt, synthetic construct
  source 1..21: mol_type = other RNA
aaagtcaagtccacgaacttt

SEQ ID NO: 180 - RNA, 21 nt, synthetic construct
  source 1..21: mol_type = other RNA
aagtcaagtccacgaactttt

SEQ ID NO: 181 - RNA, 21 nt, synthetic construct
  source 1..21: mol_type = other RNA
agtcaagtccacgaacttttt

SEQ ID NO: 182 - RNA, 21 nt, synthetic construct
  source 1..21: mol_type = other RNA
gtcaagtccacgaactttctt

SEQ ID NO: 183 - RNA, 21 nt, synthetic construct
  source 1..21: mol_type = other RNA
tcaagtccacgaactttcttt

SEQ ID NO: 184 - RNA, 21 nt, synthetic construct
  source 1..21: mol_type = other RNA
caagtccacgaactttctttt

SEQ ID NO: 185 - RNA, 21 nt, synthetic construct
  source 1..21: mol_type = other RNA
aagtccacgaactttcttctt

SEQ ID NO: 186 - RNA, 21 nt, synthetic construct
  source 1..21: mol_type = other RNA
agtccacgaactttcttcatt

SEQ ID NO: 187 - RNA, 21 nt, synthetic construct
  source 1..21: mol_type = other RNA
gtccacgaactttcttcattt

SEQ ID NO: 188 - RNA, 21 nt, synthetic construct
  source 1..21: mol_type = other RNA
tccacgaactttcttcatgtt

SEQ ID NO: 189 - RNA, 21 nt, synthetic construct
  source 1..21: mol_type = other RNA
cacgaactttcttcatgtgtt

SEQ ID NO: 190 - RNA, 21 nt, synthetic construct
  source 1..21: mol_type = other RNA
tcaccaagctcagtctacgtt

SEQ ID NO: 191 - RNA, 21 nt, synthetic construct
  source 1..21: mol_type = other RNA
caccaagctcagtctacgctt

SEQ ID NO: 192 - RNA, 21 nt, synthetic construct
  source 1..21: mol_type = other RNA
accaagctcagtctacgcctt

SEQ ID NO: 193 - RNA, 21 nt, synthetic construct
  source 1..21: mol_type = other RNA
ccaagctcagtctacgccttt

SEQ ID NO: 194 - RNA, 21 nt, synthetic construct
  source 1..21: mol_type = other RNA
caagctcagtctacgcctctt

SEQ ID NO: 195 - RNA, 21 nt, synthetic construct
  source 1..21: mol_type = other RNA
agctcagtctacgcctctgtt

SEQ ID NO: 196 - RNA, 21 nt, synthetic construct
  source 1..21: mol_type = other RNA
cagtctacgcctctgcacatt

SEQ ID NO: 197 - RNA, 21 nt, synthetic construct
  source 1..21: mol_type = other RNA
agtctacgcctctgcacagtt

SEQ ID NO: 198 - RNA, 21 nt, synthetic construct
  source 1..21: mol_type = other RNA
acgcctctgcacagggaactt

SEQ ID NO: 199 - RNA, 21 nt, synthetic construct
  source 1..21: mol_type = other RNA
ctgcacagggaacctctactt

SEQ ID NO: 200 - RNA, 21 nt, synthetic construct
  source 1..21: mol_type = other RNA
tgcacagggaacctctacctt

SEQ ID NO: 201 - RNA, 21 nt, synthetic construct
  source 1..21: mol_type = other RNA
acagggaacctctaccttctt

SEQ ID NO: 202 - RNA, 21 nt, synthetic construct
  source 1..21: mol_type = other RNA
ctcaaggtgctgggagagatt

SEQ ID NO: 203 - RNA, 21 nt, synthetic construct
  source 1..21: mol_type = other RNA
aaggtgctgggagagatattt

SEQ ID NO: 204 - RNA, 21 nt, synthetic construct
  source 1..21: mol_type = other RNA
aggtgctgggagagatatgtt

SEQ ID NO: 205 - RNA, 21 nt, synthetic construct
  source 1..21: mol_type = other RNA
ggtgctgggagagatatgctt

SEQ ID NO: 206 - RNA, 21 nt, synthetic construct
  source 1..21: mol_type = other RNA
gtgctgggagagatatgcctt

SEQ ID NO: 207 - RNA, 21 nt, synthetic construct
  source 1..21: mol_type = other RNA
tgctgggagagatatgccttt

SEQ ID NO: 208 - RNA, 21 nt, synthetic construct
  source 1..21: mol_type = other RNA
ggagagatatgccttcgagtt

SEQ ID NO: 209 - RNA, 21 nt, synthetic construct
  source 1..21: mol_type = other RNA
attcaggttcttggaagagtt

SEQ ID NO: 210 - RNA, 21 nt, synthetic construct
  source 1..21: mol_type = other RNA
tcaggttcttggaagagaatt

SEQ ID NO: 211 - RNA, 21 nt, synthetic construct
  source 1..21: mol_type = other RNA
tcttggaagagaagggcattt

SEQ ID NO: 212 - RNA, 21 nt, synthetic construct
  source 1..21: mol_type = other RNA
cttggaagagaagggcatctt

SEQ ID NO: 213 - RNA, 21 nt, synthetic construct
  source 1..21: mol_type = other RNA
ttggaagagaagggcatcttt

SEQ ID NO: 214 - RNA, 21 nt, synthetic construct
  source 1..21: mol_type = other RNA
ggaagagaagggcatctgctt

SEQ ID NO: 215 - RNA, 21 nt, synthetic construct
  source 1..21: mol_type = other RNA
gaagagaagggcatctgcatt

SEQ ID NO: 216 - RNA, 21 nt, synthetic construct
  source 1..21: mol_type = other RNA
aagagaagggcatctgcaatt

SEQ ID NO: 217 - RNA, 21 nt, synthetic construct
  source 1..21: mol_type = other RNA
agaagggcatctgcaacagtt

SEQ ID NO: 218 - RNA, 21 nt, synthetic construct
  source 1..21: mol_type = other RNA
agggcatctgcaacaggcctt

SEQ ID NO: 219 - RNA, 21 nt, synthetic construct
  source 1..21: mol_type = other RNA
gcatctgcaacaggccccatt

SEQ ID NO: 220 - RNA, 21 nt, synthetic construct
  source 1..21: mol_type = other RNA
cagcactgagtgaagaaattt

SEQ ID NO: 221 - RNA, 21 nt, synthetic construct
  source 1..21: mol_type = other RNA
ttgcaacttgctacccatttt

SEQ ID NO: 222 - RNA, 21 nt, synthetic construct
  source 1..21: mol_type = other RNA
gctacccattaggataatgtt

SEQ ID NO: 223 - RNA, 21 nt, synthetic construct
  source 1..21: mol_type = other RNA
acccattaggataatgtcttt

SEQ ID NO: 224 - RNA, 21 nt, synthetic construct
  source 1..21: mol_type = other RNA
cccattaggataatgtctttt

SEQ ID NO: 225 - RNA, 21 nt, synthetic construct
  source 1..21: mol_type = other RNA
cattaggataatgtcttattt

SEQ ID NO: 226 - RNA, 21 nt, synthetic construct
  source 1..21: mol_type = other RNA
tgctgccctgtaccctgcctt

SEQ ID NO: 227 - RNA, 21 nt, synthetic construct
  source 1..21: mol_type = other RNA
gccctgtaccctgcctgtgtt

SEQ ID NO: 228 - RNA, 21 nt, synthetic construct
  source 1..21: mol_type = other RNA
cctgcctgtggaatctgcctt

SEQ ID NO: 229 - RNA, 21 nt, synthetic construct
  source 1..21: mol_type = other RNA
gcctgtggaatctgccatttt

SEQ ID NO: 230 - RNA, 21 nt, synthetic construct
  source 1..21: mol_type = other RNA
agactggtgacatggcttctt

SEQ ID NO: 231 - RNA, 21 nt, synthetic construct
  source 1..21: mol_type = other RNA
tgtgtctgctccccgcctctt

SEQ ID NO: 232 - RNA, 21 nt, synthetic construct
  source 1..21: mol_type = other RNA
tgtctgctccccgcctccatt

SEQ ID NO: 233 - RNA, 21 nt, synthetic construct
  source 1..21: mol_type = other RNA
atgtacgacgcagagcgcggc

SEQ ID NO: 234 - RNA, 21 nt, synthetic construct
  source 1..21: mol_type = other RNA
gtacgacgcagagcgcggctg

SEQ ID NO: 235 - RNA, 21 nt, synthetic construct
  source 1..21: mol_type = other RNA
tacgacgcagagcgcggctgg

SEQ ID NO: 236 - RNA, 21 nt, synthetic construct
  source 1..21: mol_type = other RNA
acgacgcagagcgcggctgga

SEQ ID NO: 237 - RNA, 21 nt, synthetic construct
  source 1..21: mol_type = other RNA
acgcagagcgcggctggagct

SEQ ID NO: 238 - RNA, 21 nt, synthetic construct
  source 1..21: mol_type = other RNA
cgcagagcgcggctggagctt

SEQ ID NO: 239 - RNA, 21 nt, synthetic construct
  source 1..21: mol_type = other RNA
gcagagcgcggctggagcttg

SEQ ID NO: 240 - RNA, 21 nt, synthetic construct
  source 1..21: mol_type = other RNA
cagagcgcggctggagcttgt

SEQ ID NO: 241 - RNA, 21 nt, synthetic construct
  source 1..21: mol_type = other RNA
agagcgcggctggagcttgtc

SEQ ID NO: 242 - RNA, 21 nt, synthetic construct
  source 1..21: mol_type = other RNA
gagcgcggctggagcttgtcc

SEQ ID NO: 243 - RNA, 21 nt, synthetic construct
  source 1..21: mol_type = other RNA
gcgcggctggagcttgtcctt

SEQ ID NO: 244 - RNA, 21 nt, synthetic construct
  source 1..21: mol_type = other RNA
gcggctggagcttgtccttcg

SEQ ID NO: 245 - RNA, 21 nt, synthetic construct
  source 1..21: mol_type = other RNA
gctggagcttgtccttcgcgg

SEQ ID NO: 246 - RNA, 21 nt, synthetic construct
  source 1..21: mol_type = other RNA
tggagcttgtccttcgcgggc

SEQ ID NO: 247 - RNA, 21 nt, synthetic construct
  source 1..21: mol_type = other RNA
ggagcttgtccttcgcgggct

SEQ ID NO: 248 - RNA, 21 nt, synthetic construct
  source 1..21: mol_type = other RNA
gagcttgtccttcgcgggctg

SEQ ID NO: 249 - RNA, 21 nt, synthetic construct
  source 1..21: mol_type = other RNA
agcttgtccttcgcgggctgc

SEQ ID NO: 250 - RNA, 21 nt, synthetic construct
  source 1..21: mol_type = other RNA
ttgtccttcgcgggctgcggc

SEQ ID NO: 251 - RNA, 21 nt, synthetic construct
  source 1..21: mol_type = other RNA
tgtccttcgcgggctgcggct

SEQ ID NO: 252 - RNA, 21 nt, synthetic construct
  source 1..21: mol_type = other RNA
gtccttcgcgggctgcggctt

SEQ ID NO: 253 - RNA, 21 nt, synthetic construct
  source 1..21: mol_type = other RNA
ggctgcggcttcctgggcttc

SEQ ID NO: 254 - RNA, 21 nt, synthetic construct
  source 1..21: mol_type = other RNA
gctgcggcttcctgggcttct

SEQ ID NO: 255 - RNA, 21 nt, synthetic construct
  source 1..21: mol_type = other RNA
ctgcggcttcctgggcttcta

SEQ ID NO: 256 - RNA, 21 nt, synthetic construct
  source 1..21: mol_type = other RNA
tgcggcttcctgggcttctac

SEQ ID NO: 257 - RNA, 21 nt, synthetic construct
  source 1..21: mol_type = other RNA
gcggcttcctgggcttctacc

SEQ ID NO: 258 - RNA, 21 nt, synthetic construct
  source 1..21: mol_type = other RNA
cttcctgggcttctaccacgt

SEQ ID NO: 259 - RNA, 21 nt, synthetic construct
  source 1..21: mol_type = other RNA
ctgggcttctaccacgtcggg

SEQ ID NO: 260 - RNA, 21 nt, synthetic construct
  source 1..21: mol_type = other RNA
tgggcttctaccacgtcgggg

SEQ ID NO: 261 - RNA, 21 nt, synthetic construct
  source 1..21: mol_type = other RNA
ggcttctaccacgtcggggcg

SEQ ID NO: 262 - RNA, 21 nt, synthetic construct
  source 1..21: mol_type = other RNA
gcttctaccacgtcggggcga

SEQ ID NO: 263 - RNA, 21 nt, synthetic construct
  source 1..21: mol_type = other RNA
cttctaccacgtcggggcgac

SEQ ID NO: 264 - RNA, 21 nt, synthetic construct
  source 1..21: mol_type = other RNA
ttctaccacgtcggggcgacc

SEQ ID NO: 265 - RNA, 21 nt, synthetic construct
  source 1..21: mol_type = other RNA
ctaccacgtcggggcgacccg

SEQ ID NO: 266 - RNA, 21 nt, synthetic construct
  source 1..21: mol_type = other RNA
tgcctgagcgagcacgccccg

SEQ ID NO: 267 - RNA, 21 nt, synthetic construct
  source 1..21: mol_type = other RNA
gcctgagcgagcacgccccgc

SEQ ID NO: 268 - RNA, 21 nt, synthetic construct
  source 1..21: mol_type = other RNA
tgagcgagcacgccccgcacc

SEQ ID NO: 269 - RNA, 21 nt, synthetic construct
  source 1..21: mol_type = other RNA
agcgagcacgccccgcacctc

SEQ ID NO: 270 - RNA, 21 nt, synthetic construct
  source 1..21: mol_type = other RNA
gcgagcacgccccgcacctcc

SEQ ID NO: 271 - RNA, 21 nt, synthetic construct
  source 1..21: mol_type = other RNA
gagcacgccccgcacctcctc

SEQ ID NO: 272 - RNA, 21 nt, synthetic construct
  source 1..21: mol_type = other RNA
cgccccgcacctcctccgcga

SEQ ID NO: 273 - RNA, 21 nt, synthetic construct
  source 1..21: mol_type = other RNA
gccccgcacctcctccgcgac

SEQ ID NO: 274 - RNA, 21 nt, synthetic construct
  source 1..21: mol_type = other RNA
ccccgcacctcctccgcgacg

SEQ ID NO: 275 - RNA, 21 nt, synthetic construct
  source 1..21: mol_type = other RNA
cccgcacctcctccgcgacgc

SEQ ID NO: 276 - RNA, 21 nt, synthetic construct
  source 1..21: mol_type = other RNA
ccgcacctcctccgcgacgcg

SEQ ID NO: 277 - RNA, 21 nt, synthetic construct
  source 1..21: mol_type = other RNA
cgcacctcctccgcgacgcgc

SEQ ID NO: 278 - RNA, 21 nt, synthetic construct
  source 1..21: mol_type = other RNA
cacctcctccgcgacgcgcgc

SEQ ID NO: 279 - RNA, 21 nt, synthetic construct
  source 1..21: mol_type = other RNA
cctcctccgcgacgcgcgcat

SEQ ID NO: 280 - RNA, 21 nt, synthetic construct
  source 1..21: mol_type = other RNA
ctcctccgcgacgcgcgcatg

SEQ ID NO: 281 - RNA, 21 nt, synthetic construct
  source 1..21: mol_type = other RNA
tcctccgcgacgcgcgcatgt

SEQ ID NO: 282 - RNA, 21 nt, synthetic construct
  source 1..21: mol_type = other RNA
cctccgcgacgcgcgcatgtt

SEQ ID NO: 283 - RNA, 21 nt, synthetic construct
  source 1..21: mol_type = other RNA
ctccgcgacgcgcgcatgttg

SEQ ID NO: 284 - RNA, 21 nt, synthetic construct
  source 1..21: mol_type = other RNA
tccgcgacgcgcgcatgttgt

SEQ ID NO: 285 - RNA, 21 nt, synthetic construct
  source 1..21: mol_type = other RNA
ccgcgacgcgcgcatgttgtt

SEQ ID NO: 286 - RNA, 21 nt, synthetic construct
  source 1..21: mol_type = other RNA
gcgacgcgcgcatgttgttcg

SEQ ID NO: 287 - RNA, 21 nt, synthetic construct
  source 1..21: mol_type = other RNA
cgacgcgcgcatgttgttcgg

SEQ ID NO: 288 - RNA, 21 nt, synthetic construct
  source 1..21: mol_type = other RNA
gacgcgcgcatgttgttcggc

SEQ ID NO: 289 - RNA, 21 nt, synthetic construct
  source 1..21: mol_type = other RNA
tcttgtgcggaaggccaggag

SEQ ID NO: 290 - RNA, 21 nt, synthetic construct
  source 1..21: mol_type = other RNA
cttgtgcggaaggccaggagt

SEQ ID NO: 291 - RNA, 21 nt, synthetic construct
  source 1..21: mol_type = other RNA
tgtgcggaaggccaggagtcg

SEQ ID NO: 292 - RNA, 21 nt, synthetic construct
  source 1..21: mol_type = other RNA
tgcggaaggccaggagtcgga

SEQ ID NO: 293 - RNA, 21 nt, synthetic construct
  source 1..21: mol_type = other RNA
cggaaggccaggagtcggaac

SEQ ID NO: 294 - RNA, 21 nt, synthetic construct
  source 1..21: mol_type = other RNA
aaggccaggagtcggaacatt

SEQ ID NO: 295 - RNA, 21 nt, synthetic construct
  source 1..21: mol_type = other RNA
aggccaggagtcggaacattg

SEQ ID NO: 296 - RNA, 21 nt, synthetic construct
  source 1..21: mol_type = other RNA
ggccaggagtcggaacattgg

SEQ ID NO: 297 - RNA, 21 nt, synthetic construct
  source 1..21: mol_type = other RNA
aggagtcggaacattggcatc

SEQ ID NO: 298 - RNA, 21 nt, synthetic construct
  source 1..21: mol_type = other RNA
ccaatgtccaccagctcatct

SEQ ID NO: 299 - RNA, 21 nt, synthetic construct
  source 1..21: mol_type = other RNA
caatgtccaccagctcatctc

SEQ ID NO: 300 - RNA, 21 nt, synthetic construct
  source 1..21: mol_type = other RNA
atgtccaccagctcatctccg

SEQ ID NO: 301 - RNA, 21 nt, synthetic construct
  source 1..21: mol_type = other RNA
tgtccaccagctcatctccgg

SEQ ID NO: 302 - RNA, 21 nt, synthetic construct
  source 1..21: mol_type = other RNA
gtccaccagctcatctccggc

SEQ ID NO: 303 - RNA, 21 nt, synthetic construct
  source 1..21: mol_type = other RNA
tccaccagctcatctccggca

SEQ ID NO: 304 - RNA, 21 nt, synthetic construct
  source 1..21: mol_type = other RNA
caccagctcatctccggcaaa

SEQ ID NO: 305 - RNA, 21 nt, synthetic construct
  source 1..21: mol_type = other RNA
tcttaccagagtgtctgatgg

SEQ ID NO: 306 - RNA, 21 nt, synthetic construct
  source 1..21: mol_type = other RNA
cttaccagagtgtctgatggg

SEQ ID NO: 307 - RNA, 21 nt, synthetic construct
  source 1..21: mol_type = other RNA
ttaccagagtgtctgatgggg

SEQ ID NO: 308 - RNA, 21 nt, synthetic construct
  source 1..21: mol_type = other RNA
taccagagtgtctgatgggga

SEQ ID NO: 309 - RNA, 21 nt, synthetic construct
  source 1..21: mol_type = other RNA
cagagtgtctgatggggaaaa

SEQ ID NO: 310 - RNA, 21 nt, synthetic construct
  source 1..21: mol_type = other RNA
agagtgtctgatggggaaaac

SEQ ID NO: 311 - RNA, 21 nt, synthetic construct
  source 1..21: mol_type = other RNA
gagtgtctgatggggaaaacg

SEQ ID NO: 312 - RNA, 21 nt, synthetic construct
  source 1..21: mol_type = other RNA
agtgtctgatggggaaaacgt

SEQ ID NO: 313 - RNA, 21 nt, synthetic construct
  source 1..21: mol_type = other RNA
gtgtctgatggggaaaacgtt

SEQ ID NO: 314 - RNA, 21 nt, synthetic construct
  source 1..21: mol_type = other RNA
tgtctgatggggaaaacgttc

SEQ ID NO: 315 - RNA, 21 nt, synthetic construct
  source 1..21: mol_type = other RNA
gtctgatggggaaaacgttct

SEQ ID NO: 316 - RNA, 21 nt, synthetic construct
  source 1..21: mol_type = other RNA
tctgatggggaaaacgttctg

SEQ ID NO: 317 - RNA, 21 nt, synthetic construct
  source 1..21: mol_type = other RNA
ctgatggggaaaacgttctgg

SEQ ID NO: 318 - RNA, 21 nt, synthetic construct
  source 1..21: mol_type = other RNA
tgatggggaaaacgttctggt

SEQ ID NO: 319 - RNA, 21 nt, synthetic construct
  source 1..21: mol_type = other RNA
gatggggaaaacgttctggtg

SEQ ID NO: 320 - RNA, 21 nt, synthetic construct
  source 1..21: mol_type = other RNA
tggggaaaacgttctggtgtc

SEQ ID NO: 321 - RNA, 21 nt, synthetic construct
  source 1..21: mol_type = other RNA
gggaaaacgttctggtgtctg

SEQ ID NO: 322 - RNA, 21 nt, synthetic construct
  source 1..21: mol_type = other RNA
ggaaaacgttctggtgtctga

SEQ ID NO: 323 - RNA, 21 nt, synthetic construct
  source 1..21: mol_type = other RNA
aaacgttctggtgtctgactt

SEQ ID NO: 324 - RNA, 21 nt, synthetic construct
  source 1..21: mol_type = other RNA
aacgttctggtgtctgacttt

SEQ ID NO: 325 - RNA, 21 nt, synthetic construct
  source 1..21: mol_type = other RNA
acgttctggtgtctgactttc

SEQ ID NO: 326 - RNA, 21 nt, synthetic construct
  source 1..21: mol_type = other RNA
cgttctggtgtctgactttcg

SEQ ID NO: 327 - RNA, 21 nt, synthetic construct
  source 1..21: mol_type = other RNA
ctggtgtctgactttcggtcc

SEQ ID NO: 328 - RNA, 21 nt, synthetic construct
  source 1..21: mol_type = other RNA
tggtgtctgactttcggtcca

SEQ ID NO: 329 - RNA, 21 nt, synthetic construct
  source 1..21: mol_type = other RNA
ggtgtctgactttcggtccaa

SEQ ID NO: 330 - RNA, 21 nt, synthetic construct
  source 1..21: mol_type = other RNA
gtgtctgactttcggtccaaa

SEQ ID NO: 331 - RNA, 21 nt, synthetic construct
  source 1..21: mol_type = other RNA
gtctgactttcggtccaaaga

SEQ ID NO: 332 - RNA, 21 nt, synthetic construct
  source 1..21: mol_type = other RNA
tctgactttcggtccaaagac

SEQ ID NO: 333 - RNA, 21 nt, synthetic construct
  source 1..21: mol_type = other RNA
ggtccaaagacgaagtcgtgg

SEQ ID NO: 334 - RNA, 21 nt, synthetic construct
  source 1..21: mol_type = other RNA
gtccaaagacgaagtcgtgga

SEQ ID NO: 335 - RNA, 21 nt, synthetic construct
  source 1..21: mol_type = other RNA
tccaaagacgaagtcgtggat

SEQ ID NO: 336 - RNA, 21 nt, synthetic construct
  source 1..21: mol_type = other RNA
caaagacgaagtcgtggatgc

SEQ ID NO: 337 - RNA, 21 nt, synthetic construct
  source 1..21: mol_type = other RNA
aaagacgaagtcgtggatgcc

SEQ ID NO: 338 - RNA, 21 nt, synthetic construct
  source 1..21: mol_type = other RNA
aagacgaagtcgtggatgcct

SEQ ID NO: 339 - RNA, 21 nt, synthetic construct
  source 1..21: mol_type = other RNA
agacgaagtcgtggatgcctt

SEQ ID NO: 340 - RNA, 21 nt, synthetic construct
  source 1..21: mol_type = other RNA
acgaagtcgtggatgccttgg

SEQ ID NO: 341 - RNA, 21 nt, synthetic construct
  source 1..21: mol_type = other RNA
cgaagtcgtggatgccttggt

SEQ ID NO: 342 - RNA, 21 nt, synthetic construct
  source 1..21: mol_type = other RNA
gaagtcgtggatgccttggta

SEQ ID NO: 343 - RNA, 21 nt, synthetic construct
  source 1..21: mol_type = other RNA
aagtcgtggatgccttggtat

SEQ ID NO: 344 - RNA, 21 nt, synthetic construct
  source 1..21: mol_type = other RNA
gtcgtggatgccttggtatgt

SEQ ID NO: 345 - RNA, 21 nt, synthetic construct
  source 1..21: mol_type = other RNA
tcgtggatgccttggtatgtt

SEQ ID NO: 346 - RNA, 21 nt, synthetic construct
  source 1..21: mol_type = other RNA
gtggatgccttggtatgttcc

SEQ ID NO: 347 - RNA, 21 nt, synthetic construct
  source 1..21: mol_type = other RNA
tggatgccttggtatgttcct

SEQ ID NO: 348 - RNA, 21 nt, synthetic construct
  source 1..21: mol_type = other RNA
ggatgccttggtatgttcctg

SEQ ID NO: 349 - RNA, 21 nt, synthetic construct
  source 1..21: mol_type = other RNA
atgccttggtatgttcctgct

SEQ ID NO: 350 - RNA, 21 nt, synthetic construct
  source 1..21: mol_type = other RNA
gccttggtatgttcctgcttc

SEQ ID NO: 351 - RNA, 21 nt, synthetic construct
  source 1..21: mol_type = other RNA
tgttcctgcttcatgcccttc

SEQ ID NO: 352 - RNA, 21 nt, synthetic construct
  source 1..21: mol_type = other RNA
tcctgcttcatgcccttctac

SEQ ID NO: 353 - RNA, 21 nt, synthetic construct
  source 1..21: mol_type = other RNA
agtggccttatccctccttcc

SEQ ID NO: 354 - RNA, 21 nt, synthetic construct
  source 1..21: mol_type = other RNA
ggccttatccctccttccttc

SEQ ID NO: 355 - RNA, 21 nt, synthetic construct
  source 1..21: mol_type = other RNA
ccttatccctccttccttcag

SEQ ID NO: 356 - RNA, 21 nt, synthetic construct
  source 1..21: mol_type = other RNA
cttatccctccttccttcaga

SEQ ID NO: 357 - RNA, 21 nt, synthetic construct
  source 1..21: mol_type = other RNA
ttatccctccttccttcagag

SEQ ID NO: 358 - RNA, 21 nt, synthetic construct
  source 1..21: mol_type = other RNA
ccctccttccttcagaggcgt

SEQ ID NO: 359 - RNA, 21 nt, synthetic construct
  source 1..21: mol_type = other RNA
cctccttccttcagaggcgtg

SEQ ID NO: 360 - RNA, 21 nt, synthetic construct
  source 1..21: mol_type = other RNA
ctccttccttcagaggcgtgc

SEQ ID NO: 361 - RNA, 21 nt, synthetic construct
  source 1..21: mol_type = other RNA
ccttccttcagaggcgtgcga

SEQ ID NO: 362 - RNA, 21 nt, synthetic construct
  source 1..21: mol_type = other RNA
cttccttcagaggcgtgcgat

SEQ ID NO: 363 - RNA, 21 nt, synthetic construct
  source 1..21: mol_type = other RNA
ttccttcagaggcgtgcgata

SEQ ID NO: 364 - RNA, 21 nt, synthetic construct
  source 1..21: mol_type = other RNA
atatgtggatggaggagtgag

SEQ ID NO: 365 - RNA, 21 nt, synthetic construct
  source 1..21: mol_type = other RNA
ggaggagtgagtgacaacgta

SEQ ID NO: 366 - RNA, 21 nt, synthetic construct
  source 1..21: mol_type = other RNA
aggagtgagtgacaacgtacc

SEQ ID NO: 367 - RNA, 21 nt, synthetic construct
  source 1..21: mol_type = other RNA
ggagtgagtgacaacgtaccc

SEQ ID NO: 368 - RNA, 21 nt, synthetic construct
  source 1..21: mol_type = other RNA
gtgagtgacaacgtacccttc

SEQ ID NO: 369 - RNA, 21 nt, synthetic construct
  source 1..21: mol_type = other RNA
tgatgccaaaacaaccatcac

SEQ ID NO: 370 - RNA, 21 nt, synthetic construct
  source 1..21: mol_type = other RNA
gatgccaaaacaaccatcacc

SEQ ID NO: 371 - RNA, 21 nt, synthetic construct
  source 1..21: mol_type = other RNA
atgccaaaacaaccatcaccg

SEQ ID NO: 372 - RNA, 21 nt, synthetic construct
  source 1..21: mol_type = other RNA
ccaaaacaaccatcaccgtgt

SEQ ID NO: 373 - RNA, 21 nt, synthetic construct
  source 1..21: mol_type = other RNA
caaaacaaccatcaccgtgtc

SEQ ID NO: 374 - RNA, 21 nt, synthetic construct
  source 1..21: mol_type = other RNA
aaacaaccatcaccgtgtccc

SEQ ID NO: 375 - RNA, 21 nt, synthetic construct
  source 1..21: mol_type = other RNA
aacaaccatcaccgtgtcccc

SEQ ID NO: 376 - RNA, 21 nt, synthetic construct
  source 1..21: mol_type = other RNA
acaaccatcaccgtgtccccc

SEQ ID NO: 377 - RNA, 21 nt, synthetic construct
  source 1..21: mol_type = other RNA
caaccatcaccgtgtccccct

SEQ ID NO: 378 - RNA, 21 nt, synthetic construct
  source 1..21: mol_type = other RNA
atcaccgtgtcccccttctat

SEQ ID NO: 379 - RNA, 21 nt, synthetic construct
  source 1..21: mol_type = other RNA
tcaccgtgtcccccttctatg

SEQ ID NO: 380 - RNA, 21 nt, synthetic construct
  source 1..21: mol_type = other RNA
caccgtgtcccccttctatgg

SEQ ID NO: 381 - RNA, 21 nt, synthetic construct
  source 1..21: mol_type = other RNA
accgtgtcccccttctatggg

SEQ ID NO: 382 - RNA, 21 nt, synthetic construct
  source 1..21: mol_type = other RNA
gtgtcccccttctatggggag

SEQ ID NO: 383 - RNA, 21 nt, synthetic construct
  source 1..21: mol_type = other RNA
tgtcccccttctatggggagt

SEQ ID NO: 384 - RNA, 21 nt, synthetic construct
  source 1..21: mol_type = other RNA
gtcccccttctatggggagta

SEQ ID NO: 385 - RNA, 21 nt, synthetic construct
  source 1..21: mol_type = other RNA
tcccccttctatggggagtac

SEQ ID NO: 386 - RNA, 21 nt, synthetic construct
  source 1..21: mol_type = other RNA
cccttctatggggagtacgac

SEQ ID NO: 387 - RNA, 21 nt, synthetic construct
  source 1..21: mol_type = other RNA
ccttctatggggagtacgaca

SEQ ID NO: 388 - RNA, 21 nt, synthetic construct
  source 1..21: mol_type = other RNA
ttctatggggagtacgacatc

SEQ ID NO: 389 - RNA, 21 nt, synthetic construct
  source 1..21: mol_type = other RNA
tctatggggagtacgacatct

SEQ ID NO: 390 - RNA, 21 nt, synthetic construct
  source 1..21: mol_type = other RNA
ctatggggagtacgacatctg

SEQ ID NO: 391 - RNA, 21 nt, synthetic construct
  source 1..21: mol_type = other RNA
tatggggagtacgacatctgc

SEQ ID NO: 392 - RNA, 21 nt, synthetic construct
  source 1..21: mol_type = other RNA
acgacatctgccctaaagtca

SEQ ID NO: 393 - RNA, 21 nt, synthetic construct
  source 1..21: mol_type = other RNA
cgacatctgccctaaagtcaa

SEQ ID NO: 394 - RNA, 21 nt, synthetic construct
  source 1..21: mol_type = other RNA
gacatctgccctaaagtcaag

SEQ ID NO: 395 - RNA, 21 nt, synthetic construct
  source 1..21: mol_type = other RNA
acatctgccctaaagtcaagt

SEQ ID NO: 396 - RNA, 21 nt, synthetic construct
  source 1..21: mol_type = other RNA
catctgccctaaagtcaagtc

SEQ ID NO: 397 - RNA, 21 nt, synthetic construct
  source 1..21: mol_type = other RNA
atctgccctaaagtcaagtcc

SEQ ID NO: 398 - RNA, 21 nt, synthetic construct
  source 1..21: mol_type = other RNA
ccctaaagtcaagtccacgaa

SEQ ID NO: 399 - RNA, 21 nt, synthetic construct
  source 1..21: mol_type = other RNA
cctaaagtcaagtccacgaac

SEQ ID NO: 400 - RNA, 21 nt, synthetic construct
  source 1..21: mol_type = other RNA
taaagtcaagtccacgaactt

SEQ ID NO: 401 - RNA, 21 nt, synthetic construct
  source 1..21: mol_type = other RNA
aaagtcaagtccacgaacttt

SEQ ID NO: 402 - RNA, 21 nt, synthetic construct
  source 1..21: mol_type = other RNA
aagtcaagtccacgaactttc

SEQ ID NO: 403 - RNA, 21 nt, synthetic construct
  source 1..21: mol_type = other RNA
agtcaagtccacgaactttct

SEQ ID NO: 404 - RNA, 21 nt, synthetic construct
  source 1..21: mol_type = other RNA
gtcaagtccacgaactttctt

SEQ ID NO: 405 - RNA, 21 nt, synthetic construct
  source 1..21: mol_type = other RNA
tcaagtccacgaactttcttc

SEQ ID NO: 406 - RNA, 21 nt, synthetic construct
  source 1..21: mol_type = other RNA
caagtccacgaactttcttca

SEQ ID NO: 407 - RNA, 21 nt, synthetic construct
  source 1..21: mol_type = other RNA
aagtccacgaactttcttcat

SEQ ID NO: 408 - RNA, 21 nt, synthetic construct
  source 1..21: mol_type = other RNA
agtccacgaactttcttcatg

SEQ ID NO: 409 - RNA, 21 nt, synthetic construct
  source 1..21: mol_type = other RNA
tccacgaactttcttcatgtg

SEQ ID NO: 410 - RNA, 21 nt, synthetic construct
  source 1..21: mol_type = other RNA
catcaccaagctcagtctacg

SEQ ID NO: 411 - RNA, 21 nt, synthetic construct
  source 1..21: mol_type = other RNA
atcaccaagctcagtctacgc

SEQ ID NO: 412 - RNA, 21 nt, synthetic construct
  source 1..21: mol_type = other RNA
tcaccaagctcagtctacgcc

SEQ ID NO: 413 - RNA, 21 nt, synthetic construct
  source 1..21: mol_type = other RNA
caccaagctcagtctacgcct

SEQ ID NO: 414 - RNA, 21 nt, synthetic construct
  source 1..21: mol_type = other RNA
accaagctcagtctacgcctc

SEQ ID NO: 415 - RNA, 21 nt, synthetic construct
  source 1..21: mol_type = other RNA
ccaagctcagtctacgcctct

SEQ ID NO: 416 - RNA, 21 nt, synthetic construct
  source 1..21: mol_type = other RNA
caagctcagtctacgcctctg

SEQ ID NO: 417 - RNA, 21 nt, synthetic construct
  source 1..21: mol_type = other RNA
ctcagtctacgcctctgcaca

SEQ ID NO: 418 - RNA, 21 nt, synthetic construct
  source 1..21: mol_type = other RNA
tcagtctacgcctctgcacag

SEQ ID NO: 419 - RNA, 21 nt, synthetic construct
  source 1..21: mol_type = other RNA
cagtctacgcctctgcacagg

SEQ ID NO: 420 - RNA, 21 nt, synthetic construct
  source 1..21: mol_type = other RNA
acgcctctgcacagggaacct

SEQ ID NO: 421 - RNA, 21 nt, synthetic construct
  source 1..21: mol_type = other RNA
cgcctctgcacagggaacctc

SEQ ID NO: 422 - RNA, 21 nt, synthetic construct
  source 1..21: mol_type = other RNA
gcctctgcacagggaacctct

SEQ ID NO: 423 - RNA, 21 nt, synthetic construct
  source 1..21: mol_type = other RNA
ctctgcacagggaacctctac

SEQ ID NO: 424 - RNA, 21 nt, synthetic construct
  source 1..21: mol_type = other RNA
tctgcacagggaacctctacc

SEQ ID NO: 425 - RNA, 21 nt, synthetic construct
  source 1..21: mol_type = other RNA
gcacagggaacctctaccttc

SEQ ID NO: 426 - RNA, 21 nt, synthetic construct
  source 1..21: mol_type = other RNA
cacagggaacctctaccttct

SEQ ID NO: 427 - RNA, 21 nt, synthetic construct
  source 1..21: mol_type = other RNA
aaggtgctgggagagatatgc

SEQ ID NO: 428 - RNA, 21 nt, synthetic construct
  source 1..21: mol_type = other RNA
aggtgctgggagagatatgcc

SEQ ID NO: 429 - RNA, 21 nt, synthetic construct
  source 1..21: mol_type = other RNA
ggtgctgggagagatatgcct

SEQ ID NO: 430 - RNA, 21 nt, synthetic construct
  source 1..21: mol_type = other RNA
gtgctgggagagatatgcctt

SEQ ID NO: 431 - RNA, 21 nt, synthetic construct
  source 1..21: mol_type = other RNA
attcaggttcttggaagagaa

SEQ ID NO: 432 - RNA, 21 nt, synthetic construct
  source 1..21: mol_type = other RNA
gttcttggaagagaagggcat

SEQ ID NO: 433 - RNA, 21 nt, synthetic construct
  source 1..21: mol_type = other RNA
ttcttggaagagaagggcatc

SEQ ID NO: 434 - RNA, 21 nt, synthetic construct
  source 1..21: mol_type = other RNA
tcttggaagagaagggcatct

SEQ ID NO: 435 - RNA, 21 nt, synthetic construct
  source 1..21: mol_type = other RNA
cttggaagagaagggcatctg

SEQ ID NO: 436 - RNA, 21 nt, synthetic construct
  source 1..21: mol_type = other RNA
ttggaagagaagggcatctgc

SEQ ID NO: 437 - RNA, 21 nt, synthetic construct
  source 1..21: mol_type = other RNA
ggaagagaagggcatctgcaa

SEQ ID NO: 438 - RNA, 21 nt, synthetic construct
  source 1..21: mol_type = other RNA
gaagagaagggcatctgcaac

SEQ ID NO: 439 - RNA, 21 nt, synthetic construct
  source 1..21: mol_type = other RNA
aagagaagggcatctgcaaca

SEQ ID NO: 440 - RNA, 21 nt, synthetic construct
  source 1..21: mol_type = other RNA
agaagggcatctgcaacaggc

SEQ ID NO: 441 - RNA, 21 nt, synthetic construct
  source 1..21: mol_type = other RNA
gaagggcatctgcaacaggcc

SEQ ID NO: 442 - RNA, 21 nt, synthetic construct
  source 1..21: mol_type = other RNA
gcatctgcaacaggccccagc

SEQ ID NO: 443 - RNA, 21 nt, synthetic construct
  source 1..21: mol_type = other RNA
ttgcaacttgctacccattag

SEQ ID NO: 444 - RNA, 21 nt, synthetic construct
  source 1..21: mol_type = other RNA
cccattaggataatgtcttat

SEQ ID NO: 445 - RNA, 21 nt, synthetic construct
  source 1..21: mol_type = other RNA
aatgctgccctgtaccctgcc

SEQ ID NO: 446 - RNA, 21 nt, synthetic construct
  source 1..21: mol_type = other RNA
tgccctgtaccctgcctgtgg

SEQ ID NO: 447 - RNA, 21 nt, synthetic construct
  source 1..21: mol_type = other RNA
gccctgtaccctgcctgtgga

SEQ ID NO: 448 - RNA, 21 nt, synthetic construct
  source 1..21: mol_type = other RNA
cctgcctgtggaatctgccat

SEQ ID NO: 449 - RNA, 21 nt, synthetic construct
  source 1..21: mol_type = other RNA
gcctgtggaatctgccattgc

SEQ ID NO: 450 - RNA, 21 nt, synthetic construct
  source 1..21: mol_type = other RNA
cagtgggtgacctcacaggtg

SEQ ID NO: 451 - RNA, 21 nt, synthetic construct
  source 1..21: mol_type = other RNA
atgtgtctgctccccgcctcc

SEQ ID NO: 452 - RNA, 21 nt, synthetic construct
  source 1..21: mol_type = other RNA
tgtgtctgctccccgcctcca

SEQ ID NO: 453 - RNA, 21 nt, synthetic construct
  source 1..21: mol_type = other RNA
cgcgctctgcgtcgtacattt

SEQ ID NO: 454 - RNA, 21 nt, synthetic construct
  source 1..21: mol_type = other RNA
ccgcgctctgcgtcgtacatt

SEQ ID NO: 455 - RNA, 21 nt, synthetic construct
  source 1..21: mol_type = other RNA
gccgcgctctgcgtcgtactt

SEQ ID NO: 456 - RNA, 21 nt, synthetic construct
  source 1..21: mol_type = other RNA
cagccgcgctctgcgtcgttt

SEQ ID NO: 457 - RNA, 21 nt, synthetic construct
  source 1..21: mol_type = other RNA
ccagccgcgctctgcgtcgtt

SEQ ID NO: 458 - RNA, 21 nt, synthetic construct
  source 1..21: mol_type = other RNA
tccagccgcgctctgcgtctt

SEQ ID NO: 459 - RNA, 21 nt, synthetic construct
  source 1..21: mol_type = other RNA
agctccagccgcgctctgctt

SEQ ID NO: 460 - RNA, 21 nt, synthetic construct
  source 1..21: mol_type = other RNA
aagctccagccgcgctctgtt

SEQ ID NO: 461 - RNA, 21 nt, synthetic construct
  source 1..21: mol_type = other RNA
caagctccagccgcgctcttt

SEQ ID NO: 462 - RNA, 21 nt, synthetic construct
  source 1..21: mol_type = other RNA
acaagctccagccgcgctctt

SEQ ID NO: 463 - RNA, 21 nt, synthetic construct
  source 1..21: mol_type = other RNA
ggacaagctccagccgcgctt

SEQ ID NO: 464 - RNA, 21 nt, synthetic construct
  source 1..21: mol_type = other RNA
aggacaagctccagccgcgtt

SEQ ID NO: 465 - RNA, 21 nt, synthetic construct
  source 1..21: mol_type = other RNA
aaggacaagctccagccgctt

SEQ ID NO: 466 - RNA, 21 nt, synthetic construct
  source 1..21: mol_type = other RNA
gcgaaggacaagctccagctt

SEQ ID NO: 467 - RNA, 21 nt, synthetic construct
  source 1..21: mol_type = other RNA
ccgcgaaggacaagctccatt

SEQ ID NO: 468 - RNA, 21 nt, synthetic construct
  source 1..21: mol_type = other RNA
cccgcgaaggacaagctcctt

SEQ ID NO: 469 - RNA, 21 nt, synthetic construct
  source 1..21: mol_type = other RNA
gcccgcgaaggacaagctctt

SEQ ID NO: 470 - RNA, 21 nt, synthetic construct
  source 1..21: mol_type = other RNA
agcccgcgaaggacaagcttt

SEQ ID NO: 471 - RNA, 21 nt, synthetic construct
  source 1..21: mol_type = other RNA
gccgcagcccgcgaaggactt

SEQ ID NO: 472 - RNA, 21 nt, synthetic construct
  source 1..21: mol_type = other RNA
aagcccaggaagccgcagctt

SEQ ID NO: 473 - RNA, 21 nt, synthetic construct
  source 1..21: mol_type = other RNA
gaagcccaggaagccgcagtt

SEQ ID NO: 474 - RNA, 21 nt, synthetic construct
  source 1..21: mol_type = other RNA
gtagaagcccaggaagccgtt

SEQ ID NO: 475 - RNA, 21 nt, synthetic construct
  source 1..21: mol_type = other RNA
cgacgtggtagaagcccagtt

SEQ ID NO: 476 - RNA, 21 nt, synthetic construct
  source 1..21: mol_type = other RNA
ccgacgtggtagaagcccatt

SEQ ID NO: 477 - RNA, 21 nt, synthetic construct
  source 1..21: mol_type = other RNA
ccccgacgtggtagaagcctt

SEQ ID NO: 478 - RNA, 21 nt, synthetic construct
  source 1..21: mol_type = other RNA
gccccgacgtggtagaagctt

SEQ ID NO: 479 - RNA, 21 nt, synthetic construct
  source 1..21: mol_type = other RNA
cgccccgacgtggtagaagtt

SEQ ID NO: 480 - RNA, 21 nt, synthetic construct
  source 1..21: mol_type = other RNA
tcgccccgacgtggtagaatt

SEQ ID NO: 481 - RNA, 21 nt, synthetic construct
  source 1..21: mol_type = other RNA
gtcgccccgacgtggtagatt

SEQ ID NO: 482 - RNA, 21 nt, synthetic construct
  source 1..21: mol_type = other RNA
ggtcgccccgacgtggtagtt

SEQ ID NO: 483 - RNA, 21 nt, synthetic construct
  source 1..21: mol_type = other RNA
cgggtcgccccgacgtggttt

SEQ ID NO: 484 - RNA, 21 nt, synthetic construct
  source 1..21: mol_type = other RNA
ggcgtgctcgctcaggcagtt

SEQ ID NO: 485 - RNA, 21 nt, synthetic construct
  source 1..21: mol_type = other RNA
gggcgtgctcgctcaggcatt

SEQ ID NO: 486 - RNA, 21 nt, synthetic construct
  source 1..21: mol_type = other RNA
cggggcgtgctcgctcaggtt

SEQ ID NO: 487 - RNA, 21 nt, synthetic construct
  source 1..21: mol_type = other RNA
gtgcggggcgtgctcgctctt

SEQ ID NO: 488 - RNA, 21 nt, synthetic construct
  source 1..21: mol_type = other RNA
ggtgcggggcgtgctcgcttt

SEQ ID NO: 489 - RNA, 21 nt, synthetic construct
  source 1..21: mol_type = other RNA
ggaggtgcggggcgtgctctt

SEQ ID NO: 490 - RNA, 21 nt, synthetic construct
  source 1..21: mol_type = other RNA
tcgcggaggaggtgcggggtt

SEQ ID NO: 491 - RNA, 21 nt, synthetic construct
  source 1..21: mol_type = other RNA
gtcgcggaggaggtgcgggtt

SEQ ID NO: 492 - RNA, 21 nt, synthetic construct
  source 1..21: mol_type = other RNA
cgtcgcggaggaggtgcggtt

SEQ ID NO: 493 - RNA, 21 nt, synthetic construct
  source 1..21: mol_type = other RNA
gcgtcgcggaggaggtgcgtt

SEQ ID NO: 494 - RNA, 21 nt, synthetic construct
  source 1..21: mol_type = other RNA
gcgcgcgtcgcggaggaggtt

SEQ ID NO: 495 - RNA, 21 nt, synthetic construct
  source 1..21: mol_type = other RNA
tgcgcgcgtcgcggaggagtt

SEQ ID NO: 496 - RNA, 21 nt, synthetic construct
  source 1..21: mol_type = other RNA
atgcgcgcgtcgcggaggatt

SEQ ID NO: 497 - RNA, 21 nt, synthetic construct
  source 1..21: mol_type = other RNA
catgcgcgcgtcgcggaggtt

SEQ ID NO: 498 - RNA, 21 nt, synthetic construct
  source 1..21: mol_type = other RNA
acatgcgcgcgtcgcggagtt

SEQ ID NO: 499 - RNA, 21 nt, synthetic construct
  source 1..21: mol_type = other RNA
aacatgcgcgcgtcgcggatt

SEQ ID NO: 500 - RNA, 21 nt, synthetic construct
  source 1..21: mol_type = other RNA
caacatgcgcgcgtcgcggtt

SEQ ID NO: 501 - RNA, 21 nt, synthetic construct
  source 1..21: mol_type = other RNA
acaacatgcgcgcgtcgcgtt

SEQ ID NO: 502 - RNA, 21 nt, synthetic construct
  source 1..21: mol_type = other RNA
aacaacatgcgcgcgtcgctt

SEQ ID NO: 503 - RNA, 21 nt, synthetic construct
  source 1..21: mol_type = other RNA
cgaacaacatgcgcgcgtctt

SEQ ID NO: 504 - RNA, 21 nt, synthetic construct
  source 1..21: mol_type = other RNA
ccgaacaacatgcgcgcgttt

SEQ ID NO: 505 - RNA, 21 nt, synthetic construct
  source 1..21: mol_type = other RNA
gccgaacaacatgcgcgcgtt

SEQ ID NO: 506 - RNA, 21 nt, synthetic construct
  source 1..21: mol_type = other RNA
cgccgaacaacatgcgcgctt

SEQ ID NO: 507 - RNA, 21 nt, synthetic construct
  source 1..21: mol_type = other RNA
cggccgaagcgccgaacaatt

SEQ ID NO: 508 - RNA, 21 nt, synthetic construct
  source 1..21: mol_type = other RNA
ccggccgaagcgccgaacatt

SEQ ID NO: 509 - RNA, 21 nt, synthetic construct
  source 1..21: mol_type = other RNA
agtgcaacgccccggccgatt

SEQ ID NO: 510 - RNA, 21 nt, synthetic construct
  source 1..21: mol_type = other RNA
tcctggccttccgcacaagtt

SEQ ID NO: 511 - RNA, 21 nt, synthetic construct
  source 1..21: mol_type = other RNA
actcctggccttccgcacatt

SEQ ID NO: 512 - RNA, 21 nt, synthetic construct
  source 1..21: mol_type = other RNA
cgactcctggccttccgcatt

SEQ ID NO: 513 - RNA, 21 nt, synthetic construct
  source 1..21: mol_type = other RNA
tccgactcctggccttccgtt

SEQ ID NO: 514 - RNA, 21 nt, synthetic construct
  source 1..21: mol_type = other RNA
tgttccgactcctggcctttt

SEQ ID NO: 515 - RNA, 21 nt, synthetic construct
  source 1..21: mol_type = other RNA
atgttccgactcctggccttt

SEQ ID NO: 516 - RNA, 21 nt, synthetic construct
  source 1..21: mol_type = other RNA
aatgttccgactcctggcctt

SEQ ID NO: 517 - RNA, 21 nt, synthetic construct
  source 1..21: mol_type = other RNA
gccaatgttccgactcctgtt

SEQ ID NO: 518 - RNA, 21 nt, synthetic construct
  source 1..21: mol_type = other RNA
tgccaatgttccgactccttt

SEQ ID NO: 519 - RNA, 21 nt, synthetic construct
  source 1..21: mol_type = other RNA
ggaagatgccaatgttccgtt

SEQ ID NO: 520 - RNA, 21 nt, synthetic construct
  source 1..21: mol_type = other RNA
gatggaagatgccaatgtttt

SEQ ID NO: 521 - RNA, 21 nt, synthetic construct
  source 1..21: mol_type = other RNA
ggatggaagatgccaatgttt

SEQ ID NO: 522 - RNA, 21 nt, synthetic construct
  source 1..21: mol_type = other RNA
acttgcttaagttgaaggatt

SEQ ID NO: 523 - RNA, 21 nt, synthetic construct
  source 1..21: mol_type = other RNA
gaacttgcttaagttgaagtt

SEQ ID NO: 524 - RNA, 21 nt, synthetic construct
  source 1..21: mol_type = other RNA
tggacattggccgggaggctt

SEQ ID NO: 525 - RNA, 21 nt, synthetic construct
  source 1..21: mol_type = other RNA
gtggacattggccgggaggtt

SEQ ID NO: 526 - RNA, 21 nt, synthetic construct
  source 1..21: mol_type = other RNA
atgagctggtggacattggtt

SEQ ID NO: 527 - RNA, 21 nt, synthetic construct
  source 1..21: mol_type = other RNA
agatgagctggtggacatttt

SEQ ID NO: 528 - RNA, 21 nt, synthetic construct
  source 1..21: mol_type = other RNA
gagatgagctggtggacattt

SEQ ID NO: 529 - RNA, 21 nt, synthetic construct
  source 1..21: mol_type = other RNA
cggagatgagctggtggactt

SEQ ID NO: 530 - RNA, 21 nt, synthetic construct
  source 1..21: mol_type = other RNA
ccggagatgagctggtggatt

SEQ ID NO: 531 - RNA, 21 nt, synthetic construct
  source 1..21: mol_type = other RNA
tttgccggagatgagctggtt

SEQ ID NO: 532 - RNA, 21 nt, synthetic construct
  source 1..21: mol_type = other RNA
ctctggtaagagagatgcctt

SEQ ID NO: 533 - RNA, 21 nt, synthetic construct
  source 1..21: mol_type = other RNA
atcagacactctggtaagatt

SEQ ID NO: 534 - RNA, 21 nt, synthetic construct
  source 1..21: mol_type = other RNA
catcagacactctggtaagtt

SEQ ID NO: 535 - RNA, 21 nt, synthetic construct
  source 1..21: mol_type = other RNA
ccatcagacactctggtaatt

SEQ ID NO: 536 - RNA, 21 nt, synthetic construct
  source 1..21: mol_type = other RNA
cccatcagacactctggtatt

SEQ ID NO: 537 - RNA, 21 nt, synthetic construct
  source 1..21: mol_type = other RNA
ttttccccatcagacactctt

SEQ ID NO: 538 - RNA, 21 nt, synthetic construct
  source 1..21: mol_type = other RNA
cgttttccccatcagacactt

SEQ ID NO: 539 - RNA, 21 nt, synthetic construct
  source 1..21: mol_type = other RNA
acgttttccccatcagacatt

SEQ ID NO: 540 - RNA, 21 nt, synthetic construct
  source 1..21: mol_type = other RNA
aacgttttccccatcagactt

SEQ ID NO: 541 - RNA, 21 nt, synthetic construct
  source 1..21: mol_type = other RNA
gaacgttttccccatcagatt

SEQ ID NO: 542 - RNA, 21 nt, synthetic construct
  source 1..21: mol_type = other RNA
agaacgttttccccatcagtt

SEQ ID NO: 543 - RNA, 21 nt, synthetic construct
  source 1..21: mol_type = other RNA
cagaacgttttccccatcatt

SEQ ID NO: 544 - RNA, 21 nt, synthetic construct
  source 1..21: mol_type = other RNA
ccagaacgttttccccatctt

SEQ ID NO: 545 - RNA, 21 nt, synthetic construct
  source 1..21: mol_type = other RNA
caccagaacgttttccccatt

SEQ ID NO: 546 - RNA, 21 nt, synthetic construct
  source 1..21: mol_type = other RNA
gacaccagaacgttttccctt

SEQ ID NO: 547 - RNA, 21 nt, synthetic construct
  source 1..21: mol_type = other RNA
agacaccagaacgttttcctt

SEQ ID NO: 548 - RNA, 21 nt, synthetic construct
  source 1..21: mol_type = other RNA
gtcagacaccagaacgttttt

SEQ ID NO: 549 - RNA, 21 nt, synthetic construct
  source 1..21: mol_type = other RNA
agtcagacaccagaacgtttt

SEQ ID NO: 550 - RNA, 21 nt, synthetic construct
  source 1..21: mol_type = other RNA
aagtcagacaccagaacgttt

SEQ ID NO: 551 - RNA, 21 nt, synthetic construct
  source 1..21: mol_type = other RNA
aaagtcagacaccagaacgtt

SEQ ID NO: 552 - RNA, 21 nt, synthetic construct
  source 1..21: mol_type = other RNA
gaaagtcagacaccagaactt

SEQ ID NO: 553 - RNA, 21 nt, synthetic construct
  source 1..21: mol_type = other RNA
cgaaagtcagacaccagaatt

SEQ ID NO: 554 - RNA, 21 nt, synthetic construct
  source 1..21: mol_type = other RNA
accgaaagtcagacaccagtt

SEQ ID NO: 555 - RNA, 21 nt, synthetic construct
  source 1..21: mol_type = other RNA
gaccgaaagtcagacaccatt

SEQ ID NO: 556 - RNA, 21 nt, synthetic construct
  source 1..21: mol_type = other RNA
ggaccgaaagtcagacacctt

SEQ ID NO: 557 - RNA, 21 nt, synthetic construct
  source 1..21: mol_type = other RNA
tggaccgaaagtcagacactt

SEQ ID NO: 558 - RNA, 21 nt, synthetic construct
  source 1..21: mol_type = other RNA
ttggaccgaaagtcagacatt

SEQ ID NO: 559 - RNA, 21 nt, synthetic construct
  source 1..21: mol_type = other RNA
tttggaccgaaagtcagactt

SEQ ID NO: 560 - RNA, 21 nt, synthetic construct
  source 1..21: mol_type = other RNA
acgacttcgtctttggacctt

SEQ ID NO: 561 - RNA, 21 nt, synthetic construct
  source 1..21: mol_type = other RNA
cacgacttcgtctttggactt

SEQ ID NO: 562 - RNA, 21 nt, synthetic construct
  source 1..21: mol_type = other RNA
ccacgacttcgtctttggatt

SEQ ID NO: 563 - RNA, 21 nt, synthetic construct
  source 1..21: mol_type = other RNA
tccacgacttcgtctttggtt

SEQ ID NO: 564 - RNA, 21 nt, synthetic construct
  source 1..21: mol_type = other RNA
atccacgacttcgtctttgtt

SEQ ID NO: 565 - RNA, 21 nt, synthetic construct
  source 1..21: mol_type = other RNA
gcatccacgacttcgtctttt

SEQ ID NO: 566 - RNA, 21 nt, synthetic construct
  source 1..21: mol_type = other RNA
ggcatccacgacttcgtcttt

SEQ ID NO: 567 - RNA, 21 nt, synthetic construct
  source 1..21: mol_type = other RNA
aggcatccacgacttcgtctt

SEQ ID NO: 568 - RNA, 21 nt, synthetic construct
  source 1..21: mol_type = other RNA
aaggcatccacgacttcgttt

SEQ ID NO: 569 - RNA, 21 nt, synthetic construct
  source 1..21: mol_type = other RNA
ccaaggcatccacgacttctt

SEQ ID NO: 570 - RNA, 21 nt, synthetic construct
  source 1..21: mol_type = other RNA
accaaggcatccacgactttt

SEQ ID NO: 571 - RNA, 21 nt, synthetic construct
  source 1..21: mol_type = other RNA
ataccaaggcatccacgactt

SEQ ID NO: 572 - RNA, 21 nt, synthetic construct
  source 1..21: mol_type = other RNA
cataccaaggcatccacgatt

SEQ ID NO: 573 - RNA, 21 nt, synthetic construct
  source 1..21: mol_type = other RNA
aacataccaaggcatccactt

SEQ ID NO: 574 - RNA, 21 nt, synthetic construct
  source 1..21: mol_type = other RNA
gaacataccaaggcatccatt

SEQ ID NO: 575 - RNA, 21 nt, synthetic construct
  source 1..21: mol_type = other RNA
ggaacataccaaggcatcctt

SEQ ID NO: 576 - RNA, 21 nt, synthetic construct
  source 1..21: mol_type = other RNA
caggaacataccaaggcattt

SEQ ID NO: 577 - RNA, 21 nt, synthetic construct
  source 1..21: mol_type = other RNA
agcaggaacataccaaggctt

SEQ ID NO: 578 - RNA, 21 nt, synthetic construct
  source 1..21: mol_type = other RNA
gggcatgaagcaggaacattt

SEQ ID NO: 579 - RNA, 21 nt, synthetic construct
  source 1..21: mol_type = other RNA
gaagggcatgaagcaggaatt

SEQ ID NO: 580 - RNA, 21 nt, synthetic construct
  source 1..21: mol_type = other RNA
agaagggcatgaagcaggatt

SEQ ID NO: 581 - RNA, 21 nt, synthetic construct
  source 1..21: mol_type = other RNA
ggaaggagggataaggccatt

SEQ ID NO: 582 - RNA, 21 nt, synthetic construct
  source 1..21: mol_type = other RNA
ctgaaggaaggagggataatt

SEQ ID NO: 583 - RNA, 21 nt, synthetic construct
  source 1..21: mol_type = other RNA
tctgaaggaaggagggatatt

SEQ ID NO: 584 - RNA, 21 nt, synthetic construct
  source 1..21: mol_type = other RNA
cgcctctgaaggaaggaggtt

SEQ ID NO: 585 - RNA, 21 nt, synthetic construct
  source 1..21: mol_type = other RNA
acgcctctgaaggaaggagtt

SEQ ID NO: 586 - RNA, 21 nt, synthetic construct
  source 1..21: mol_type = other RNA
gcacgcctctgaaggaaggtt

SEQ ID NO: 587 - RNA, 21 nt, synthetic construct
  source 1..21: mol_type = other RNA
cgcacgcctctgaaggaagtt

SEQ ID NO: 588 - RNA, 21 nt, synthetic construct
  source 1..21: mol_type = other RNA
tcgcacgcctctgaaggaatt

SEQ ID NO: 589 - RNA, 21 nt, synthetic construct
  source 1..21: mol_type = other RNA
atcgcacgcctctgaaggatt

SEQ ID NO: 590 - RNA, 21 nt, synthetic construct
  source 1..21: mol_type = other RNA
tatcgcacgcctctgaaggtt

SEQ ID NO: 591 - RNA, 21 nt, synthetic construct
  source 1..21: mol_type = other RNA
cactcctccatccacatattt

SEQ ID NO: 592 - RNA, 21 nt, synthetic construct
  source 1..21: mol_type = other RNA
tcactcactcctccatccatt

SEQ ID NO: 593 - RNA, 21 nt, synthetic construct
  source 1..21: mol_type = other RNA
ttgtcactcactcctccattt

SEQ ID NO: 594 - RNA, 21 nt, synthetic construct
  source 1..21: mol_type = other RNA
tacgttgtcactcactccttt

SEQ ID NO: 595 - RNA, 21 nt, synthetic construct
  source 1..21: mol_type = other RNA
gtacgttgtcactcactcctt

SEQ ID NO: 596 - RNA, 21 nt, synthetic construct
  source 1..21: mol_type = other RNA
gggtacgttgtcactcacttt

SEQ ID NO: 597 - RNA, 21 nt, synthetic construct
  source 1..21: mol_type = other RNA
agggtacgttgtcactcactt

SEQ ID NO: 598 - RNA, 21 nt, synthetic construct
  source 1..21: mol_type = other RNA
gaagggtacgttgtcactctt

SEQ ID NO: 599 - RNA, 21 nt, synthetic construct
  source 1..21: mol_type = other RNA
gtgatggttgttttggcattt

SEQ ID NO: 600 - RNA, 21 nt, synthetic construct
  source 1..21: mol_type = other RNA
ggtgatggttgttttggcatt

SEQ ID NO: 601 - RNA, 21 nt, synthetic construct
  source 1..21: mol_type = other RNA
cggtgatggttgttttggctt

SEQ ID NO: 602 - RNA, 21 nt, synthetic construct
  source 1..21: mol_type = other RNA
acacggtgatggttgtttttt

SEQ ID NO: 603 - RNA, 21 nt, synthetic construct
  source 1..21: mol_type = other RNA
gacacggtgatggttgttttt

SEQ ID NO: 604 - RNA, 21 nt, synthetic construct
  source 1..21: mol_type = other RNA
gggacacggtgatggttgttt

SEQ ID NO: 605 - RNA, 21 nt, synthetic construct
  source 1..21: mol_type = other RNA
ggggacacggtgatggttgtt

SEQ ID NO: 606 - RNA, 21 nt, synthetic construct
  source 1..21: mol_type = other RNA
gggggacacggtgatggtttt

SEQ ID NO: 607 - RNA, 21 nt, synthetic construct
  source 1..21: mol_type = other RNA
atagaagggggacacggtgtt

SEQ ID NO: 608 - RNA, 21 nt, synthetic construct
  source 1..21: mol_type = other RNA
catagaagggggacacggttt

SEQ ID NO: 609 - RNA, 21 nt, synthetic construct
  source 1..21: mol_type = other RNA
ccccatagaagggggacactt

SEQ ID NO: 610 - RNA, 21 nt, synthetic construct
  source 1..21: mol_type = other RNA
tccccatagaagggggacatt

SEQ ID NO: 611 - RNA, 21 nt, synthetic construct
  source 1..21: mol_type = other RNA
ctccccatagaagggggactt

SEQ ID NO: 612 - RNA, 21 nt, synthetic construct
  source 1..21: mol_type = other RNA
actccccatagaagggggatt

SEQ ID NO: 613 - RNA, 21 nt, synthetic construct
  source 1..21: mol_type = other RNA
cgtactccccatagaagggtt

SEQ ID NO: 614 - RNA, 21 nt, synthetic construct
  source 1..21: mol_type = other RNA
tcgtactccccatagaaggtt

SEQ ID NO: 615 - RNA, 21 nt, synthetic construct
  source 1..21: mol_type = other RNA
tgtcgtactccccatagaatt

SEQ ID NO: 616 - RNA, 21 nt, synthetic construct
  source 1..21: mol_type = other RNA
atgtcgtactccccatagatt

SEQ ID NO: 617 - RNA, 21 nt, synthetic construct
  source 1..21: mol_type = other RNA
gatgtcgtactccccatagtt

SEQ ID NO: 618 - RNA, 21 nt, synthetic construct
  source 1..21: mol_type = other RNA
agatgtcgtactccccatatt

SEQ ID NO: 619 - RNA, 21 nt, synthetic construct
  source 1..21: mol_type = other RNA
ctttagggcagatgtcgtatt

SEQ ID NO: 620 - RNA, 21 nt, synthetic construct
  source 1..21: mol_type = other RNA
actttagggcagatgtcgttt

SEQ ID NO: 621 - RNA, 21 nt, synthetic construct
  source 1..21: mol_type = other RNA
gactttagggcagatgtcgtt

SEQ ID NO: 622 - RNA, 21 nt, synthetic construct
  source 1..21: mol_type = other RNA
tgactttagggcagatgtctt

SEQ ID NO: 623 - RNA, 21 nt, synthetic construct
  source 1..21: mol_type = other RNA
ttgactttagggcagatgttt

SEQ ID NO: 624 - RNA, 21 nt, synthetic construct
  source 1..21: mol_type = other RNA
cttgactttagggcagatgtt

SEQ ID NO: 625 - RNA, 21 nt, synthetic construct
  source 1..21: mol_type = other RNA
acttgactttagggcagattt

SEQ ID NO: 626 - RNA, 21 nt, synthetic construct
  source 1..21: mol_type = other RNA
cgtggacttgactttagggtt

SEQ ID NO: 627 - RNA, 21 nt, synthetic construct
  source 1..21: mol_type = other RNA
tcgtggacttgactttaggtt

SEQ ID NO: 628 - RNA, 21 nt, synthetic construct
  source 1..21: mol_type = other RNA
gttcgtggacttgactttatt

SEQ ID NO: 629 - RNA, 21 nt, synthetic construct
  source 1..21: mol_type = other RNA
agttcgtggacttgacttttt

SEQ ID NO: 630 - RNA, 21 nt, synthetic construct
  source 1..21: mol_type = other RNA
aagttcgtggacttgactttt

SEQ ID NO: 631 - RNA, 21 nt, synthetic construct
  source 1..21: mol_type = other RNA
aaagttcgtggacttgacttt

SEQ ID NO: 632 - RNA, 21 nt, synthetic construct
  source 1..21: mol_type = other RNA
gaaagttcgtggacttgactt

SEQ ID NO: 633 - RNA, 21 nt, synthetic construct
  source 1..21: mol_type = other RNA
agaaagttcgtggacttgatt

SEQ ID NO: 634 - RNA, 21 nt, synthetic construct
  source 1..21: mol_type = other RNA
aagaaagttcgtggacttgtt

SEQ ID NO: 635 - RNA, 21 nt, synthetic construct
  source 1..21: mol_type = other RNA
gaagaaagttcgtggactttt

SEQ ID NO: 636 - RNA, 21 nt, synthetic construct
  source 1..21: mol_type = other RNA
tgaagaaagttcgtggacttt

SEQ ID NO: 637 - RNA, 21 nt, synthetic construct
  source 1..21: mol_type = other RNA
atgaagaaagttcgtggactt

SEQ ID NO: 638 - RNA, 21 nt, synthetic construct
  source 1..21: mol_type = other RNA
catgaagaaagttcgtggatt

SEQ ID NO: 639 - RNA, 21 nt, synthetic construct
  source 1..21: mol_type = other RNA
cacatgaagaaagttcgtgtt

SEQ ID NO: 640 - RNA, 21 nt, synthetic construct
  source 1..21: mol_type = other RNA
cgtagactgagcttggtgatt

SEQ ID NO: 641 - RNA, 21 nt, synthetic construct
  source 1..21: mol_type = other RNA
gcgtagactgagcttggtgtt

SEQ ID NO: 642 - RNA, 21 nt, synthetic construct
  source 1..21: mol_type = other RNA
ggcgtagactgagcttggttt

SEQ ID NO: 643 - RNA, 21 nt, synthetic construct
  source 1..21: mol_type = other RNA
aggcgtagactgagcttggtt

SEQ ID NO: 644 - RNA, 21 nt, synthetic construct
  source 1..21: mol_type = other RNA
gaggcgtagactgagcttgtt

SEQ ID NO: 645 - RNA, 21 nt, synthetic construct
  source 1..21: mol_type = other RNA
cagaggcgtagactgagcttt

SEQ ID NO: 646 - RNA, 21 nt, synthetic construct
  source 1..21: mol_type = other RNA
tgtgcagaggcgtagactgtt

SEQ ID NO: 647 - RNA, 21 nt, synthetic construct
  source 1..21: mol_type = other RNA
ctgtgcagaggcgtagacttt

SEQ ID NO: 648 - RNA, 21 nt, synthetic construct
  source 1..21: mol_type = other RNA
gttccctgtgcagaggcgttt

SEQ ID NO: 649 - RNA, 21 nt, synthetic construct
  source 1..21: mol_type = other RNA
gtagaggttccctgtgcagtt

SEQ ID NO: 650 - RNA, 21 nt, synthetic construct
  source 1..21: mol_type = other RNA
ggtagaggttccctgtgcatt

SEQ ID NO: 651 - RNA, 21 nt, synthetic construct
  source 1..21: mol_type = other RNA
gaaggtagaggttccctgttt

SEQ ID NO: 652 - RNA, 21 nt, synthetic construct
  source 1..21: mol_type = other RNA
tctctcccagcaccttgagtt

SEQ ID NO: 653 - RNA, 21 nt, synthetic construct
  source 1..21: mol_type = other RNA
atatctctcccagcacctttt

SEQ ID NO: 654 - RNA, 21 nt, synthetic construct
  source 1..21: mol_type = other RNA
catatctctcccagcaccttt

SEQ ID NO: 655 - RNA, 21 nt, synthetic construct
  source 1..21: mol_type = other RNA
gcatatctctcccagcacctt

SEQ ID NO: 656 - RNA, 21 nt, synthetic construct
  source 1..21: mol_type = other RNA
ggcatatctctcccagcactt

SEQ ID NO: 657 - RNA, 21 nt, synthetic construct
  source 1..21: mol_type = other RNA
aggcatatctctcccagcatt

SEQ ID NO: 658 - RNA, 21 nt, synthetic construct
  source 1..21: mol_type = other RNA
ctcgaaggcatatctctcctt

SEQ ID NO: 659 - RNA, 21 nt, synthetic construct
  source 1..21: mol_type = other RNA
ctcttccaagaacctgaattt

SEQ ID NO: 660 - RNA, 21 nt, synthetic construct
  source 1..21: mol_type = other RNA
ttctcttccaagaacctgatt

SEQ ID NO: 661 - RNA, 21 nt, synthetic construct
  source 1..21: mol_type = other RNA
atgcccttctcttccaagatt

SEQ ID NO: 662 - RNA, 21 nt, synthetic construct
  source 1..21: mol_type = other RNA
gatgcccttctcttccaagtt

SEQ ID NO: 663 - RNA, 21 nt, synthetic construct
  source 1..21: mol_type = other RNA
agatgcccttctcttccaatt

SEQ ID NO: 664 - RNA, 21 nt, synthetic construct
  source 1..21: mol_type = other RNA
gcagatgcccttctcttcctt

SEQ ID NO: 665 - RNA, 21 nt, synthetic construct
  source 1..21: mol_type = other RNA
tgcagatgcccttctcttctt

SEQ ID NO: 666 - RNA, 21 nt, synthetic construct
  source 1..21: mol_type = other RNA
ttgcagatgcccttctctttt

SEQ ID NO: 667 - RNA, 21 nt, synthetic construct
  source 1..21: mol_type = other RNA
ctgttgcagatgcccttcttt

SEQ ID NO: 668 - RNA, 21 nt, synthetic construct
  source 1..21: mol_type = other RNA
ggcctgttgcagatgcccttt

SEQ ID NO: 669 - RNA, 21 nt, synthetic construct
  source 1..21: mol_type = other RNA
tggggcctgttgcagatgctt

SEQ ID NO: 670 - RNA, 21 nt, synthetic construct
  source 1..21: mol_type = other RNA
atttcttcactcagtgctgtt

SEQ ID NO: 671 - RNA, 21 nt, synthetic construct
  source 1..21: mol_type = other RNA
aatgggtagcaagttgcaatt

SEQ ID NO: 672 - RNA, 21 nt, synthetic construct
  source 1..21: mol_type = other RNA
cattatcctaatgggtagctt

SEQ ID NO: 673 - RNA, 21 nt, synthetic construct
  source 1..21: mol_type = other RNA
agacattatcctaatgggttt

SEQ ID NO: 674 - RNA, 21 nt, synthetic construct
  source 1..21: mol_type = other RNA
aagacattatcctaatgggtt

SEQ ID NO: 675 - RNA, 21 nt, synthetic construct
  source 1..21: mol_type = other RNA
ataagacattatcctaatgtt

SEQ ID NO: 676 - RNA, 21 nt, synthetic construct
  source 1..21: mol_type = other RNA
ggcagggtacagggcagcatt

SEQ ID NO: 677 - RNA, 21 nt, synthetic construct
  source 1..21: mol_type = other RNA
cacaggcagggtacagggctt

SEQ ID NO: 678 - RNA, 21 nt, synthetic construct
  source 1..21: mol_type = other RNA
ggcagattccacaggcaggtt

SEQ ID NO: 679 - RNA, 21 nt, synthetic construct
  source 1..21: mol_type = other RNA
aatggcagattccacaggctt

SEQ ID NO: 680 - RNA, 21 nt, synthetic construct
  source 1..21: mol_type = other RNA
gaagccatgtcaccagtcttt

SEQ ID NO: 681 - RNA, 21 nt, synthetic construct
  source 1..21: mol_type = other RNA
gaggcggggagcagacacatt

SEQ ID NO: 682 - RNA, 21 nt, synthetic construct
  source 1..21: mol_type = other RNA
tggaggcggggagcagacatt

SEQ ID NO: 683 - RNA, 23 nt, synthetic construct
  source 1..23: mol_type = other RNA
gccgcgctctgcgtcgtacattt

SEQ ID NO: 684 - RNA, 23 nt, synthetic construct
  source 1..23: mol_type = other RNA
cagccgcgctctgcgtcgtactt

SEQ ID NO: 685 - RNA, 23 nt, synthetic construct
  source 1..23: mol_type = other RNA
ccagccgcgctctgcgtcgtatt

SEQ ID NO: 686 - RNA, 23 nt, synthetic construct
  source 1..23: mol_type = other RNA
tccagccgcgctctgcgtcgttt

SEQ ID NO: 687 - RNA, 23 nt, synthetic construct
  source 1..23: mol_type = other RNA
agctccagccgcgctctgcgttt

SEQ ID NO: 688 - RNA, 23 nt, synthetic construct
  source 1..23: mol_type = other RNA
aagctccagccgcgctctgcgtt

SEQ ID NO: 689 - RNA, 23 nt, synthetic construct
  source 1..23: mol_type = other RNA
caagctccagccgcgctctgctt

SEQ ID NO: 690 - RNA, 23 nt, synthetic construct
  source 1..23: mol_type = other RNA
acaagctccagccgcgctctgtt

SEQ ID NO: 691 - RNA, 23 nt, synthetic construct
  source 1..23: mol_type = other RNA
gacaagctccagccgcgctcttt

SEQ ID NO: 692 - RNA, 23 nt, synthetic construct
  source 1..23: mol_type = other RNA
ggacaagctccagccgcgctctt

SEQ ID NO: 693 - RNA, 23 nt, synthetic construct
  source 1..23: mol_type = other RNA
aaggacaagctccagccgcgctt

SEQ ID NO: 694 - RNA, 23 nt, synthetic construct
  source 1..23: mol_type = other RNA
cgaaggacaagctccagccgctt

SEQ ID NO: 695 - RNA, 23 nt, synthetic construct
  source 1..23: mol_type = other RNA
ccgcgaaggacaagctccagctt

SEQ ID NO: 696 - RNA, 23 nt, synthetic construct
  source 1..23: mol_type = other RNA
gcccgcgaaggacaagctccatt

SEQ ID NO: 697 - RNA, 23 nt, synthetic construct
  source 1..23: mol_type = other RNA
agcccgcgaaggacaagctcctt

SEQ ID NO: 698 - RNA, 23 nt, synthetic construct
  source 1..23: mol_type = other RNA
cagcccgcgaaggacaagctctt

SEQ ID NO: 699 - RNA, 23 nt, synthetic construct
  source 1..23: mol_type = other RNA
gcagcccgcgaaggacaagcttt

SEQ ID NO: 700 - RNA, 23 nt, synthetic construct
  source 1..23: mol_type = other RNA
gccgcagcccgcgaaggacaatt

SEQ ID NO: 701 - RNA, 23 nt, synthetic construct
  source 1..23: mol_type = other RNA
agccgcagcccgcgaaggacatt

SEQ ID NO: 702 - RNA, 23 nt, synthetic construct
  source 1..23: mol_type = other RNA
aagccgcagcccgcgaaggactt

SEQ ID NO: 703 - RNA, 23 nt, synthetic construct
  source 1..23: mol_type = other RNA
gaagcccaggaagccgcagcctt

SEQ ID NO: 704 - RNA, 23 nt, synthetic construct
  source 1..23: mol_type = other RNA
agaagcccaggaagccgcagctt

SEQ ID NO: 705 - RNA, 23 nt, synthetic construct
  source 1..23: mol_type = other RNA
tagaagcccaggaagccgcagtt

SEQ ID NO: 706 - RNA, 23 nt, synthetic construct
  source 1..23: mol_type = other RNA
gtagaagcccaggaagccgcatt

SEQ ID NO: 707 - RNA, 23 nt, synthetic construct
  source 1..23: mol_type = other RNA
ggtagaagcccaggaagccgctt

SEQ ID NO: 708 - RNA, 23 nt, synthetic construct
  source 1..23: mol_type = other RNA
acgtggtagaagcccaggaagtt

SEQ ID NO: 709 - RNA, 23 nt, synthetic construct
  source 1..23: mol_type = other RNA
cccgacgtggtagaagcccagtt

SEQ ID NO: 710 - RNA, 23 nt, synthetic construct
  source 1..23: mol_type = other RNA
ccccgacgtggtagaagcccatt

SEQ ID NO: 711 - RNA, 23 nt, synthetic construct
  source 1..23: mol_type = other RNA
cgccccgacgtggtagaagcctt

SEQ ID NO: 712 - RNA, 23 nt, synthetic construct
  source 1..23: mol_type = other RNA
tcgccccgacgtggtagaagctt

SEQ ID NO: 713 - RNA, 23 nt, synthetic construct
  source 1..23: mol_type = other RNA
gtcgccccgacgtggtagaagtt

SEQ ID NO: 714 - RNA, 23 nt, synthetic construct
  source 1..23: mol_type = other RNA
ggtcgccccgacgtggtagaatt

SEQ ID NO: 715 - RNA, 23 nt, synthetic construct
  source 1..23: mol_type = other RNA
cgggtcgccccgacgtggtagtt

SEQ ID NO: 716 - RNA, 23 nt, synthetic construct
  source 1..23: mol_type = other RNA
cggggcgtgctcgctcaggcatt

SEQ ID NO: 717 - RNA, 23 nt, synthetic construct
  source 1..23: mol_type = other RNA
gcggggcgtgctcgctcaggctt

SEQ ID NO: 718 - RNA, 23 nt, synthetic construct
  source 1..23: mol_type = other RNA
ggtgcggggcgtgctcgctcatt

SEQ ID NO: 719 - RNA, 23 nt, synthetic construct
  source 1..23: mol_type = other RNA
gaggtgcggggcgtgctcgcttt

SEQ ID NO: 720 - RNA, 23 nt, synthetic construct
  source 1..23: mol_type = other RNA
ggaggtgcggggcgtgctcgctt

SEQ ID NO: 721 - RNA, 23 nt, synthetic construct
  source 1..23: mol_type = other RNA
gaggaggtgcggggcgtgctctt

SEQ ID NO: 722 - RNA, 23 nt, synthetic construct
  source 1..23: mol_type = other RNA
tcgcggaggaggtgcggggcgtt

SEQ ID NO: 723 - RNA, 23 nt, synthetic construct
  source 1..23: mol_type = other RNA
gtcgcggaggaggtgcggggctt

SEQ ID NO: 724 - RNA, 23 nt, synthetic construct
  source 1..23: mol_type = other RNA
cgtcgcggaggaggtgcggggtt

SEQ ID NO: 725 - RNA, 23 nt, synthetic construct
  source 1..23: mol_type = other RNA
gcgtcgcggaggaggtgcgggtt

SEQ ID NO: 726 - RNA, 23 nt, synthetic construct
  source 1..23: mol_type = other RNA
cgcgtcgcggaggaggtgcggtt

SEQ ID NO: 727 - RNA, 23 nt, synthetic construct
  source 1..23: mol_type = other RNA
gcgcgtcgcggaggaggtgcgtt

SEQ ID NO: 728 - RNA, 23 nt, synthetic construct
  source 1..23: mol_type = other RNA
gcgcgcgtcgcggaggaggtgtt

SEQ ID NO: 729 - RNA, 23 nt, synthetic construct
  source 1..23: mol_type = other RNA
atgcgcgcgtcgcggaggaggtt

SEQ ID NO: 730 - RNA, 23 nt, synthetic construct
  source 1..23: mol_type = other RNA
catgcgcgcgtcgcggaggagtt

SEQ ID NO: 731 - RNA, 23 nt, synthetic construct
  source 1..23: mol_type = other RNA
acatgcgcgcgtcgcggaggatt

SEQ ID NO: 732 - RNA, 23 nt, synthetic construct
  source 1..23: mol_type = other RNA
aacatgcgcgcgtcgcggaggtt

SEQ ID NO: 733 - RNA, 23 nt, synthetic construct
  source 1..23: mol_type = other RNA
caacatgcgcgcgtcgcggagtt

SEQ ID NO: 734 - RNA, 23 nt, synthetic construct
  source 1..23: mol_type = other RNA
acaacatgcgcgcgtcgcggatt

SEQ ID NO: 735 - RNA, 23 nt, synthetic construct
  source 1..23: mol_type = other RNA
aacaacatgcgcgcgtcgcggtt

SEQ ID NO: 736 - RNA, 23 nt, synthetic construct
  source 1..23: mol_type = other RNA
cgaacaacatgcgcgcgtcgctt

SEQ ID NO: 737 - RNA, 23 nt, synthetic construct
  source 1..23: mol_type = other RNA
ccgaacaacatgcgcgcgtcgtt

SEQ ID NO: 738 - RNA, 23 nt, synthetic construct
  source 1..23: mol_type = other RNA
gccgaacaacatgcgcgcgtctt

SEQ ID NO: 739 - RNA, 23 nt, synthetic construct
  source 1..23: mol_type = other RNA
ctcctggccttccgcacaagatt

SEQ ID NO: 740 - RNA, 23 nt, synthetic construct
  source 1..23: mol_type = other RNA
actcctggccttccgcacaagtt

SEQ ID NO: 741 - RNA, 23 nt, synthetic construct
  source 1..23: mol_type = other RNA
cgactcctggccttccgcacatt

SEQ ID NO: 742 - RNA, 23 nt, synthetic construct
  source 1..23: mol_type = other RNA
tccgactcctggccttccgcatt

SEQ ID NO: 743 - RNA, 23 nt, synthetic construct
  source 1..23: mol_type = other RNA
gttccgactcctggccttccgtt

SEQ ID NO: 744 - RNA, 23 nt, synthetic construct
  source 1..23: mol_type = other RNA
aatgttccgactcctggcctttt

SEQ ID NO: 745 - RNA, 23 nt, synthetic construct
  source 1..23: mol_type = other RNA
caatgttccgactcctggccttt

SEQ ID NO: 746 - RNA, 23 nt, synthetic construct
  source 1..23: mol_type = other RNA
ccaatgttccgactcctggcctt

SEQ ID NO: 747 - RNA, 23 nt, synthetic construct
  source 1..23: mol_type = other RNA
gatgccaatgttccgactccttt

SEQ ID NO: 748 - RNA, 23 nt, synthetic construct
  source 1..23: mol_type = other RNA
agatgagctggtggacattggtt

SEQ ID NO: 749 - RNA, 23 nt, synthetic construct
  source 1..23: mol_type = other RNA
gagatgagctggtggacattgtt

SEQ ID NO: 750 - RNA, 23 nt, synthetic construct
  source 1..23: mol_type = other RNA
cggagatgagctggtggacattt

SEQ ID NO: 751 - RNA, 23 nt, synthetic construct
  source 1..23: mol_type = other RNA
ccggagatgagctggtggacatt

SEQ ID NO: 752 - RNA, 23 nt, synthetic construct
  source 1..23: mol_type = other RNA
gccggagatgagctggtggactt

SEQ ID NO: 753 - RNA, 23 nt, synthetic construct
  source 1..23: mol_type = other RNA
tgccggagatgagctggtggatt

SEQ ID NO: 754 - RNA, 23 nt, synthetic construct
  source 1..23: mol_type = other RNA
tttgccggagatgagctggtgtt

SEQ ID NO: 755 - RNA, 23 nt, synthetic construct
  source 1..23: mol_type = other RNA
ccatcagacactctggtaagatt

SEQ ID NO: 756 - RNA, 23 nt, synthetic construct
  source 1..23: mol_type = other RNA
cccatcagacactctggtaagtt

SEQ ID NO: 757 - RNA, 23 nt, synthetic construct
  source 1..23: mol_type = other RNA
ccccatcagacactctggtaatt

SEQ ID NO: 758 - RNA, 23 nt, synthetic construct
  source 1..23: mol_type = other RNA
tccccatcagacactctggtatt

SEQ ID NO: 759 - RNA, 23 nt, synthetic construct
  source 1..23: mol_type = other RNA
ttttccccatcagacactctgtt

SEQ ID NO: 760 - RNA, 23 nt, synthetic construct
  source 1..23: mol_type = other RNA
gttttccccatcagacactcttt

SEQ ID NO: 761 - RNA, 23 nt, synthetic construct
  source 1..23: mol_type = other RNA
cgttttccccatcagacactctt

SEQ ID NO: 762 - RNA, 23 nt, synthetic construct
  source 1..23: mol_type = other RNA
acgttttccccatcagacacttt

SEQ ID NO: 763 - RNA, 23 nt, synthetic construct
  source 1..23: mol_type = other RNA
aacgttttccccatcagacactt

SEQ ID NO: 764 - RNA, 23 nt, synthetic construct
  source 1..23: mol_type = other RNA
gaacgttttccccatcagacatt

SEQ ID NO: 765 - RNA, 23 nt, synthetic construct
  source 1..23: mol_type = other RNA
agaacgttttccccatcagactt

SEQ ID NO: 766 - RNA, 23 nt, synthetic construct
  source 1..23: mol_type = other RNA
cagaacgttttccccatcagatt

SEQ ID NO: 767 - RNA, 23 nt, synthetic construct
  source 1..23: mol_type = other RNA
ccagaacgttttccccatcagtt

SEQ ID NO: 768 - RNA, 23 nt, synthetic construct
  source 1..23: mol_type = other RNA
accagaacgttttccccatcatt

SEQ ID NO: 769 - RNA, 23 nt, synthetic construct
  source 1..23: mol_type = other RNA
caccagaacgttttccccatctt

SEQ ID NO: 770 - RNA, 23 nt, synthetic construct
  source 1..23: mol_type = other RNA
gacaccagaacgttttccccatt

SEQ ID NO: 771 - RNA, 23 nt, synthetic construct
  source 1..23: mol_type = other RNA
cagacaccagaacgttttccctt

SEQ ID NO: 772 - RNA, 23 nt, synthetic construct
  source 1..23: mol_type = other RNA
tcagacaccagaacgttttcctt

SEQ ID NO: 773 - RNA, 23 nt, synthetic construct
  source 1..23: mol_type = other RNA
aagtcagacaccagaacgttttt

SEQ ID NO: 774 - RNA, 23 nt, synthetic construct
  source 1..23: mol_type = other RNA
aaagtcagacaccagaacgtttt

SEQ ID NO: 775 - RNA, 23 nt, synthetic construct
  source 1..23: mol_type = other RNA
gaaagtcagacaccagaacgttt

SEQ ID NO: 776 - RNA, 23 nt, synthetic construct
  source 1..23: mol_type = other RNA
cgaaagtcagacaccagaacgtt

SEQ ID NO: 777 - RNA, 23 nt, synthetic construct
  source 1..23: mol_type = other RNA
ggaccgaaagtcagacaccagtt

SEQ ID NO: 778 - RNA, 23 nt, synthetic construct
  source 1..23: mol_type = other RNA
tggaccgaaagtcagacaccatt

SEQ ID NO: 779 - RNA, 23 nt, synthetic construct
  source 1..23: mol_type = other RNA
ttggaccgaaagtcagacacctt

SEQ ID NO: 780 - RNA, 23 nt, synthetic construct
  source 1..23: mol_type = other RNA
tttggaccgaaagtcagacactt

SEQ ID NO: 781 - RNA, 23 nt, synthetic construct
  source 1..23: mol_type = other RNA
tctttggaccgaaagtcagactt

SEQ ID NO: 782 - RNA, 23 nt, synthetic construct
  source 1..23: mol_type = other RNA
gtctttggaccgaaagtcagatt

SEQ ID NO: 783 - RNA, 23 nt, synthetic construct
  source 1..23: mol_type = other RNA
ccacgacttcgtctttggacctt

SEQ ID NO: 784 - RNA, 23 nt, synthetic construct
  source 1..23: mol_type = other RNA
tccacgacttcgtctttggactt

SEQ ID NO: 785 - RNA, 23 nt, synthetic construct
  source 1..23: mol_type = other RNA
atccacgacttcgtctttggatt

SEQ ID NO: 786 - RNA, 23 nt, synthetic construct
  source 1..23: mol_type = other RNA
gcatccacgacttcgtctttgtt

SEQ ID NO: 787 - RNA, 23 nt, synthetic construct
  source 1..23: mol_type = other RNA
ggcatccacgacttcgtcttttt

SEQ ID NO: 788 - RNA, 23 nt, synthetic construct
  source 1..23: mol_type = other RNA
aggcatccacgacttcgtctttt

SEQ ID NO: 789 - RNA, 23 nt, synthetic construct
  source 1..23: mol_type = other RNA
aaggcatccacgacttcgtcttt

SEQ ID NO: 790 - RNA, 23 nt, synthetic construct
  source 1..23: mol_type = other RNA
ccaaggcatccacgacttcgttt

SEQ ID NO: 791 - RNA, 23 nt, synthetic construct
  source 1..23: mol_type = other RNA
accaaggcatccacgacttcgtt

SEQ ID NO: 792 - RNA, 23 nt, synthetic construct
  source 1..23: mol_type = other RNA
taccaaggcatccacgacttctt

SEQ ID NO: 793 - RNA, 23 nt, synthetic construct
  source 1..23: mol_type = other RNA
ataccaaggcatccacgactttt

SEQ ID NO: 794 - RNA, 23 nt, synthetic construct
  source 1..23: mol_type = other RNA
acataccaaggcatccacgactt

SEQ ID NO: 795 - RNA, 23 nt, synthetic construct
  source 1..23: mol_type = other RNA
aacataccaaggcatccacgatt

SEQ ID NO: 796 - RNA, 23 nt, synthetic construct
  source 1..23: mol_type = other RNA
ggaacataccaaggcatccactt

SEQ ID NO: 797 - RNA, 23 nt, synthetic construct
  source 1..23: mol_type = other RNA
aggaacataccaaggcatccatt

SEQ ID NO: 798 - RNA, 23 nt, synthetic construct
  source 1..23: mol_type = other RNA
caggaacataccaaggcatcctt

SEQ ID NO: 799 - RNA, 23 nt, synthetic construct
  source 1..23: mol_type = other RNA
agcaggaacataccaaggcattt

SEQ ID NO: 800 - RNA, 23 nt, synthetic construct
  source 1..23: mol_type = other RNA
gaagcaggaacataccaaggctt

SEQ ID NO: 801 - RNA, 23 nt, synthetic construct
  source 1..23: mol_type = other RNA
gaagggcatgaagcaggaacatt

SEQ ID NO: 802 - RNA, 23 nt, synthetic construct
  source 1..23: mol_type = other RNA
gtagaagggcatgaagcaggatt

SEQ ID NO: 803 - RNA, 23 nt, synthetic construct
  source 1..23: mol_type = other RNA
ggaaggagggataaggccacttt

SEQ ID NO: 804 - RNA, 23 nt, synthetic construct
  source 1..23: mol_type = other RNA
gaaggaaggagggataaggcctt

SEQ ID NO: 805 - RNA, 23 nt, synthetic construct
  source 1..23: mol_type = other RNA
ctgaaggaaggagggataaggtt

SEQ ID NO: 806 - RNA, 23 nt, synthetic construct
  source 1..23: mol_type = other RNA
tctgaaggaaggagggataagtt

SEQ ID NO: 807 - RNA, 23 nt, synthetic construct
  source 1..23: mol_type = other RNA
ctctgaaggaaggagggataatt

SEQ ID NO: 808 - RNA, 23 nt, synthetic construct
  source 1..23: mol_type = other RNA
acgcctctgaaggaaggagggtt

SEQ ID NO: 809 - RNA, 23 nt, synthetic construct
  source 1..23: mol_type = other RNA
cacgcctctgaaggaaggaggtt

SEQ ID NO: 810 - RNA, 23 nt, synthetic construct
  source 1..23: mol_type = other RNA
gcacgcctctgaaggaaggagtt

SEQ ID NO: 811 - RNA, 23 nt, synthetic construct
  source 1..23: mol_type = other RNA
tcgcacgcctctgaaggaaggtt

SEQ ID NO: 812 - RNA, 23 nt, synthetic construct
  source 1..23: mol_type = other RNA
atcgcacgcctctgaaggaagtt

SEQ ID NO: 813 - RNA, 23 nt, synthetic construct
  source 1..23: mol_type = other RNA
tatcgcacgcctctgaaggaatt

SEQ ID NO: 814 - RNA, 23 nt, synthetic construct
  source 1..23: mol_type = other RNA
ctcactcctccatccacatattt

SEQ ID NO: 815 - RNA, 23 nt, synthetic construct
  source 1..23: mol_type = other RNA
tacgttgtcactcactcctcctt

SEQ ID NO: 816 - RNA, 23 nt, synthetic construct
  source 1..23: mol_type = other RNA
ggtacgttgtcactcactccttt

SEQ ID NO: 817 - RNA, 23 nt, synthetic construct
  source 1..23: mol_type = other RNA
gggtacgttgtcactcactcctt

SEQ ID NO: 818 - RNA, 23 nt, synthetic construct
  source 1..23: mol_type = other RNA
gaagggtacgttgtcactcactt

SEQ ID NO: 819 - RNA, 23 nt, synthetic construct
  source 1..23: mol_type = other RNA
gtgatggttgttttggcatcatt

SEQ ID NO: 820 - RNA, 23 nt, synthetic construct
  source 1..23: mol_type = other RNA
ggtgatggttgttttggcatctt

SEQ ID NO: 821 - RNA, 23 nt, synthetic construct
  source 1..23: mol_type = other RNA
cggtgatggttgttttggcattt

SEQ ID NO: 822 - RNA, 23 nt, synthetic construct
  source 1..23: mol_type = other RNA
acacggtgatggttgttttggtt

SEQ ID NO: 823 - RNA, 23 nt, synthetic construct
  source 1..23: mol_type = other RNA
gacacggtgatggttgttttgtt

SEQ ID NO: 824 - RNA, 23 nt, synthetic construct
  source 1..23: mol_type = other RNA
gggacacggtgatggttgttttt

SEQ ID NO: 825 - RNA, 23 nt, synthetic construct
  source 1..23: mol_type = other RNA
ggggacacggtgatggttgtttt

SEQ ID NO: 826 - RNA, 23 nt, synthetic construct
  source 1..23: mol_type = other RNA
gggggacacggtgatggttgttt

SEQ ID NO: 827 - RNA, 23 nt, synthetic construct
  source 1..23: mol_type = other RNA
agggggacacggtgatggttgtt

SEQ ID NO: 828 - RNA, 23 nt, synthetic construct
  source 1..23: mol_type = other RNA
atagaagggggacacggtgattt

SEQ ID NO: 829 - RNA, 23 nt, synthetic construct
  source 1..23: mol_type = other RNA
catagaagggggacacggtgatt

SEQ ID NO: 830 - RNA, 23 nt, synthetic construct
  source 1..23: mol_type = other RNA
ccatagaagggggacacggtgtt

SEQ ID NO: 831 - RNA, 23 nt, synthetic construct
  source 1..23: mol_type = other RNA
cccatagaagggggacacggttt

SEQ ID NO: 832 - RNA, 23 nt, synthetic construct
  source 1..23: mol_type = other RNA
ctccccatagaagggggacactt

SEQ ID NO: 833 - RNA, 23 nt, synthetic construct
  source 1..23: mol_type = other RNA
actccccatagaagggggacatt

SEQ ID NO: 834 - RNA, 23 nt, synthetic construct
  source 1..23: mol_type = other RNA
tactccccatagaagggggactt

SEQ ID NO: 835 - RNA, 23 nt, synthetic construct
  source 1..23: mol_type = other RNA
gtactccccatagaagggggatt

SEQ ID NO: 836 - RNA, 23 nt, synthetic construct
  source 1..23: mol_type = other RNA
gtcgtactccccatagaagggtt

SEQ ID NO: 837 - RNA, 23 nt, synthetic construct
  source 1..23: mol_type = other RNA
tgtcgtactccccatagaaggtt

SEQ ID NO: 838 - RNA, 23 nt, synthetic construct
  source 1..23: mol_type = other RNA
gatgtcgtactccccatagaatt

SEQ ID NO: 839 - RNA, 23 nt, synthetic construct
  source 1..23: mol_type = other RNA
agatgtcgtactccccatagatt

SEQ ID NO: 840 - RNA, 23 nt, synthetic construct
  source 1..23: mol_type = other RNA
cagatgtcgtactccccatagtt

SEQ ID NO: 841 - RNA, 23 nt, synthetic construct
  source 1..23: mol_type = other RNA
gcagatgtcgtactccccatatt

SEQ ID NO: 842 - RNA, 23 nt, synthetic construct
  source 1..23: mol_type = other RNA
tgactttagggcagatgtcgttt

SEQ ID NO: 843 - RNA, 23 nt, synthetic construct
  source 1..23: mol_type = other RNA
ttgactttagggcagatgtcgtt

SEQ ID NO: 844 - RNA, 23 nt, synthetic construct
  source 1..23: mol_type = other RNA
cttgactttagggcagatgtctt

SEQ ID NO: 845 - RNA, 23 nt, synthetic construct
  source 1..23: mol_type = other RNA
acttgactttagggcagatgttt

SEQ ID NO: 846 - RNA, 23 nt, synthetic construct
  source 1..23: mol_type = other RNA
gacttgactttagggcagatgtt

SEQ ID NO: 847 - RNA, 23 nt, synthetic construct
  source 1..23: mol_type = other RNA
ggacttgactttagggcagattt

SEQ ID NO: 848 - RNA, 23 nt, synthetic construct
  source 1..23: mol_type = other RNA
ttcgtggacttgactttagggtt

SEQ ID NO: 849 - RNA, 23 nt, synthetic construct
  source 1..23: mol_type = other RNA
gttcgtggacttgactttaggtt

SEQ ID NO: 850 - RNA, 23 nt, synthetic construct
  source 1..23: mol_type = other RNA
aagttcgtggacttgactttatt

SEQ ID NO: 851 - RNA, 23 nt, synthetic construct
  source 1..23: mol_type = other RNA
aaagttcgtggacttgacttttt

SEQ ID NO: 852 - RNA, 23 nt, synthetic construct
  source 1..23: mol_type = other RNA
gaaagttcgtggacttgactttt

SEQ ID NO: 853 - RNA, 23 nt, synthetic construct
  source 1..23: mol_type = other RNA
agaaagttcgtggacttgacttt

SEQ ID NO: 854 - RNA, 23 nt, synthetic construct
  source 1..23: mol_type = other RNA
aagaaagttcgtggacttgactt

SEQ ID NO: 855 - RNA, 23 nt, synthetic construct
  source 1..23: mol_type = other RNA
gaagaaagttcgtggacttgatt

SEQ ID NO: 856 - RNA, 23 nt, synthetic construct
  source 1..23: mol_type = other RNA
tgaagaaagttcgtggacttgtt

SEQ ID NO: 857 - RNA, 23 nt, synthetic construct
  source 1..23: mol_type = other RNA
atgaagaaagttcgtggactttt

SEQ ID NO: 858 - RNA, 23 nt, synthetic construct
  source 1..23: mol_type = other RNA
catgaagaaagttcgtggacttt

SEQ ID NO: 859 - RNA, 23 nt, synthetic construct
  source 1..23: mol_type = other RNA
cacatgaagaaagttcgtggatt

SEQ ID NO: 860 - RNA, 23 nt, synthetic construct
  source 1..23: mol_type = other RNA
cgtagactgagcttggtgatgtt

SEQ ID NO: 861 - RNA, 23 nt, synthetic construct
  source 1..23: mol_type = other RNA
gcgtagactgagcttggtgattt

SEQ ID NO: 862 - RNA, 23 nt, synthetic construct
  source 1..23: mol_type = other RNA
ggcgtagactgagcttggtgatt

SEQ ID NO: 863 - RNA, 23 nt, synthetic construct
  source 1..23: mol_type = other RNA
aggcgtagactgagcttggtgtt

SEQ ID NO: 864 - RNA, 23 nt, synthetic construct
  source 1..23: mol_type = other RNA
gaggcgtagactgagcttggttt

SEQ ID NO: 865 - RNA, 23 nt, synthetic construct
  source 1..23: mol_type = other RNA
agaggcgtagactgagcttggtt

SEQ ID NO: 866 - RNA, 23 nt, synthetic construct
  source 1..23: mol_type = other RNA
cagaggcgtagactgagcttgtt

SEQ ID NO: 867 - RNA, 23 nt, synthetic construct
  source 1..23: mol_type = other RNA
tgtgcagaggcgtagactgagtt

SEQ ID NO: 868 - RNA, 23 nt, synthetic construct
  source 1..23: mol_type = other RNA
ctgtgcagaggcgtagactgatt

SEQ ID NO: 869 - RNA, 23 nt, synthetic construct
  source 1..23: mol_type = other RNA
cctgtgcagaggcgtagactgtt

SEQ ID NO: 870 - RNA, 23 nt, synthetic construct
  source 1..23: mol_type = other RNA
aggttccctgtgcagaggcgttt

SEQ ID NO: 871 - RNA, 23 nt, synthetic construct
  source 1..23: mol_type = other RNA
gaggttccctgtgcagaggcgtt

SEQ ID NO: 872 - RNA, 23 nt, synthetic construct
  source 1..23: mol_type = other RNA
agaggttccctgtgcagaggctt

SEQ ID NO: 873 - RNA, 23 nt, synthetic construct
  source 1..23: mol_type = other RNA
gtagaggttccctgtgcagagtt

SEQ ID NO: 874 - RNA, 23 nt, synthetic construct
  source 1..23: mol_type = other RNA
ggtagaggttccctgtgcagatt

SEQ ID NO: 875 - RNA, 23 nt, synthetic construct
  source 1..23: mol_type = other RNA
gaaggtagaggttccctgtgctt

SEQ ID NO: 876 - RNA, 23 nt, synthetic construct
  source 1..23: mol_type = other RNA
agaaggtagaggttccctgtgtt

SEQ ID NO: 877 - RNA, 23 nt, synthetic construct
  source 1..23: mol_type = other RNA
gcatatctctcccagcacctttt

SEQ ID NO: 878 - RNA, 23 nt, synthetic construct
  source 1..23: mol_type = other RNA
ggcatatctctcccagcaccttt

SEQ ID NO: 879 - RNA, 23 nt, synthetic construct
  source 1..23: mol_type = other RNA
aggcatatctctcccagcacctt

SEQ ID NO: 880 - RNA, 23 nt, synthetic construct
  source 1..23: mol_type = other RNA
aaggcatatctctcccagcactt

SEQ ID NO: 881 - RNA, 23 nt, synthetic construct
  source 1..23: mol_type = other RNA
ttctcttccaagaacctgaattt

SEQ ID NO: 882 - RNA, 23 nt, synthetic construct
  source 1..23: mol_type = other RNA
atgcccttctcttccaagaactt

SEQ ID NO: 883 - RNA, 23 nt, synthetic construct
  source 1..23: mol_type = other RNA
gatgcccttctcttccaagaatt

SEQ ID NO: 884 - RNA, 23 nt, synthetic construct
  source 1..23: mol_type = other RNA
agatgcccttctcttccaagatt

SEQ ID NO: 885 - RNA, 23 nt, synthetic construct
  source 1..23: mol_type = other RNA
cagatgcccttctcttccaagtt

SEQ ID NO: 886 - RNA, 23 nt, synthetic construct
  source 1..23: mol_type = other RNA
gcagatgcccttctcttccaatt

SEQ ID NO: 887 - RNA, 23 nt, synthetic construct
  source 1..23: mol_type = other RNA
ttgcagatgcccttctcttcctt

SEQ ID NO: 888 - RNA, 23 nt, synthetic construct
  source 1..23: mol_type = other RNA
gttgcagatgcccttctcttctt

SEQ ID NO: 889 - RNA, 23 nt, synthetic construct
  source 1..23: mol_type = other RNA
tgttgcagatgcccttctctttt

SEQ ID NO: 890 - RNA, 23 nt, synthetic construct
  source 1..23: mol_type = other RNA
gcctgttgcagatgcccttcttt

SEQ ID NO: 891 - RNA, 23 nt, synthetic construct
  source 1..23: mol_type = other RNA
ggcctgttgcagatgcccttctt

SEQ ID NO: 892 - RNA, 23 nt, synthetic construct
  source 1..23: mol_type = other RNA
gctggggcctgttgcagatgctt

SEQ ID NO: 893 - RNA, 23 nt, synthetic construct
  source 1..23: mol_type = other RNA
ctaatgggtagcaagttgcaatt

SEQ ID NO: 894 - RNA, 23 nt, synthetic construct
  source 1..23: mol_type = other RNA
ataagacattatcctaatgggtt

SEQ ID NO: 895 - RNA, 23 nt, synthetic construct
  source 1..23: mol_type = other RNA
ggcagggtacagggcagcatttt

SEQ ID NO: 896 - RNA, 23 nt, synthetic construct
  source 1..23: mol_type = other RNA
ccacaggcagggtacagggcatt

SEQ ID NO: 897 - RNA, 23 nt, synthetic construct
  source 1..23: mol_type = other RNA
tccacaggcagggtacagggctt

SEQ ID NO: 898 - RNA, 23 nt, synthetic construct
  source 1..23: mol_type = other RNA
atggcagattccacaggcaggtt

SEQ ID NO: 899 - RNA, 23 nt, synthetic construct
  source 1..23: mol_type = other RNA
gcaatggcagattccacaggctt

SEQ ID NO: 900 - RNA, 23 nt, synthetic construct
  source 1..23: mol_type = other RNA
cacctgtgaggtcacccactgtt

SEQ ID NO: 901 - RNA, 23 nt, synthetic construct
  source 1..23: mol_type = other RNA
ggaggcggggagcagacacattt

SEQ ID NO: 902 - RNA, 23 nt, synthetic construct
  source 1..23: mol_type = other RNA
tggaggcggggagcagacacatt

SEQ ID NO: 903 - RNA, 21 nt, synthetic construct
  source 1..21: mol_type = other RNA
  modified_base 1: mod_base = OTHER; note = 2'-fluoro adenosine phosphorothioate
  modified_base 2: mod_base = OTHER; note = 2'O-methyl uridine phosphorothioate
  modified_base 3: mod_base = OTHER; note = 2'-fluoro guanosine
  modified_base 4: mod_base = OTHER; note = 2'O-methyl uridine
  modified_base 5: mod_base = OTHER; note = 2'-fluoro adenosine
  modified_base 6: mod_base = OTHER; note = 2'O-methyl cytidine
  modified_base 7: mod_base = OTHER; note = 2'-fluoro guanosine
  modified_base 8: mod_base = OTHER; note = 2'O-methyl adenosine
  modified_base 9: mod_base = OTHER; note = 2'-fluoro cytidine
  modified_base 10: mod_base = OTHER; note = 2'O-methyl guanosine
  modified_base 11: mod_base = OTHER; note = 2'-fluoro cytidine
  modified_base 12: mod_base = OTHER; note = 2'O-methyl adenosine
  modified_base 13: mod_base = OTHER; note = 2'-fluoro guanosine
  modified_base 14: mod_base = OTHER; note = 2'O-methyl adenosine
  modified_base 15: mod_base = OTHER; note = 2'-fluoro guanosine
  modified_base 16: mod_base = OTHER; note = 2'O-methyl cytidine
  modified_base 17: mod_base = OTHER; note = 2'-fluoro guanosine
  modified_base 18: mod_base = OTHER; note = 2'O-methyl cytidine
  modified_base 19: mod_base = OTHER; note = 2'-fluoro guanosine phosphorothioate
  modified_base 20: mod_base = OTHER; note = 2'O-methyl uridine phosphorothioate
  modified_base 21: mod_base = OTHER; note = 2'O-methyl uridine
atgtacgacgcagagcgcgtt

SEQ ID NO: 904 - RNA, 21 nt, synthetic construct
  source 1..21: mol_type = other RNA
  modified_base 1: mod_base = OTHER; note = 2'-fluoro uridine phosphorothioate
  modified_base 2: mod_base = OTHER; note = 2'O-methyl guanosine phosphorothioate
  modified_base 3: mod_base = OTHER; note = 2'-fluoro uridine
  modified_base 4: mod_base = OTHER; note = 2'O-methyl adenosine
  modified_base 5: mod_base = OTHER; note = 2'-fluoro cytidine
  modified_base 6: mod_base = OTHER; note = 2'O-methyl guanosine
  modified_base 7: mod_base = OTHER; note = 2'-fluoro adenosine
  modified_base 8: mod_base = OTHER; note = 2'O-methyl cytidine
  modified_base 9: mod_base = OTHER; note = 2'-fluoro guanosine
  modified_base 10: mod_base = OTHER; note = 2'O-methyl cytidine
  modified_base 11: mod_base = OTHER; note = 2'-fluoro adenosine
  modified_base 12: mod_base = OTHER; note = 2'O-methyl guanosine
  modified_base 13: mod_base = OTHER; note = 2'-fluoro adenosine
  modified_base 14: mod_base = OTHER; note = 2'O-methyl guanosine
  modified_base 15: mod_base = OTHER; note = 2'-fluoro cytidine
  modified_base 16: mod_base = OTHER; note = 2'O-methyl guanosine
  modified_base 17: mod_base = OTHER; note = 2'-fluoro cytidine
  modified_base 18: mod_base = OTHER; note = 2'O-methyl guanosine
  modified_base 19: mod_base = OTHER; note = 2'-fluoro guanosine phosphorothioate
  modified_base 20: mod_base = OTHER; note = 2'O-methyl uridine phosphorothioate
  modified_base 21: mod_base = OTHER; note = 2'O-methyl uridine
tgtacgacgcagagcgcggtt

SEQ ID NO: 905 - RNA, 21 nt, synthetic construct
  source 1..21: mol_type = other RNA
  modified_base 1: mod_base = OTHER; note = 2'-fluoro guanosine phosphorothioate
  modified_base 2: mod_base = OTHER; note = 2'O-methyl uridine phosphorothioate
  modified_base 3: mod_base = OTHER; note = 2'-fluoro adenosine
  modified_base 4: mod_base = OTHER; note = 2'O-methyl cytidine
  modified_base 5: mod_base = OTHER; note = 2'-fluoro guanosine
  modified_base 6: mod_base = OTHER; note = 2'O-methyl adenosine
  modified_base 7: mod_base = OTHER; note = 2'-fluoro cytidine
  modified_base 8: mod_base = OTHER; note = 2'O-methyl guanosine
  modified_base 9: mod_base = OTHER; note = 2'-fluoro cytidine
  modified_base 10: mod_base = OTHER; note = 2'O-methyl adenosine
  modified_base 11: mod_base = OTHER; note = 2'-fluoro guanosine
  modified_base 12: mod_base = OTHER; note = 2'O-methyl adenosine
  modified_base 13: mod_base = OTHER; note = 2'-fluoro guanosine
  modified_base 14: mod_base = OTHER; note = 2'O-methyl cytidine
  modified_base 15: mod_base = OTHER; note = 2'-fluoro guanosine
  modified_base 16: mod_base = OTHER; note = 2'O-methyl cytidine
  modified_base 17: mod_base = OTHER; note = 2'-fluoro guanosine
  modified_base 18: mod_base = OTHER; note = 2'O-methyl guanosine
  modified_base 19: mod_base = OTHER; note = 2'-fluoro cytidine phosphorothioate
  modified_base 20: mod_base = OTHER; note = 2'O-methyl uridine phosphorothioate
  modified_base 21: mod_base = OTHER; note = 2'O-methyl uridine
gtacgacgcagagcgcggctt

SEQ ID NO: 906 - RNA, 21 nt, synthetic construct
  source 1..21: mol_type = other RNA
  modified_base 1: mod_base = OTHER; note = 2'-fluoro adenosine phosphorothioate
  modified_base 2: mod_base = OTHER; note = 2'O-methyl cytidine phosphorothioate
  modified_base 3: mod_base = OTHER; note = 2'-fluoro guanosine
  modified_base 4: mod_base = OTHER; note = 2'O-methyl adenosine
  modified_base 5: mod_base = OTHER; note = 2'-fluoro cytidine
  modified_base 6: mod_base = OTHER; note = 2'O-methyl guanosine
  modified_base 7: mod_base = OTHER; note = 2'-fluoro cytidine
  modified_base 8: mod_base = OTHER; note = 2'O-methyl adenosine
  modified_base 9: mod_base = OTHER; note = 2'-fluoro guanosine
  modified_base 10: mod_base = OTHER; note = 2'O-methyl adenosine
  modified_base 11: mod_base = OTHER; note = 2'-fluoro guanosine
  modified_base 12: mod_base = OTHER; note = 2'O-methyl cytidine
  modified_base 13: mod_base = OTHER; note = 2'-fluoro guanosine
  modified_base 14: mod_base = OTHER; note = 2'O-methyl cytidine
  modified_base 15: mod_base = OTHER; note = 2'-fluoro guanosine
  modified_base 16: mod_base = OTHER; note = 2'O-methyl guanosine
  modified_base 17: mod_base = OTHER; note = 2'-fluoro cytidine
  modified_base 18: mod_base = OTHER; note = 2'O-methyl uridine
  modified_base 19: mod_base = OTHER; note = 2'-fluoro guanosine phosphorothioate
  modified_base 20: mod_base = OTHER; note = 2'O-methyl uridine phosphorothioate
  modified_base 21: mod_base = OTHER; note = 2'O-methyl uridine
acgacgcagagcgcggctgtt

SEQ ID NO: 907 - RNA, 21 nt, synthetic construct
  source 1..21: mol_type = other RNA
  modified_base 1: mod_base = OTHER; note = 2'-fluoro cytidine phosphorothioate
  modified_base 2: mod_base = OTHER; note = 2'O-methyl guanosine phosphorothioate
  modified_base 3: mod_base = OTHER; note = 2'-fluoro adenosine
  modified_base 4: mod_base = OTHER; note = 2'O-methyl cytidine
  modified_base 5: mod_base = OTHER; note = 2'-fluoro guanosine
  modified_base 6: mod_base = OTHER; note = 2'O-methyl cytidine
  modified_base 7: mod_base = OTHER; note = 2'-fluoro adenosine
  modified_base 8: mod_base = OTHER; note = 2'O-methyl guanosine
  modified_base 9: mod_base = OTHER; note = 2'-fluoro adenosine
  modified_base 10: mod_base = OTHER; note = 2'O-methyl guanosine
  modified_base 11: mod_base = OTHER; note = 2'-fluoro cytidine
  modified_base 12: mod_base = OTHER; note = 2'O-methyl guanosine
  modified_base 13: mod_base = OTHER; note = 2'-fluoro cytidine
  modified_base 14: mod_base = OTHER; note = 2'O-methyl guanosine
  modified_base 15: mod_base = OTHER; note = 2'-fluoro guanosine
  modified_base 16: mod_base = OTHER; note = 2'O-methyl cytidine
  modified_base 17: mod_base = OTHER; note = 2'-fluoro uridine
  modified_base 18: mod_base = OTHER; note = 2'O-methyl guanosine
  modified_base 19: mod_base = OTHER; note = 2'-fluoro guanosine phosphorothioate
  modified_base 20: mod_base = OTHER; note = 2'O-methyl uridine phosphorothioate
  modified_base 21: mod_base = OTHER; note = 2'O-methyl uridine
cgacgcagagcgcggctggtt

SEQ ID NO: 908 - RNA, 21 nt, synthetic construct
  source 1..21: mol_type = other RNA
  modified_base 1: mod_base = OTHER; note = 2'-fluoro guanosine phosphorothioate
  modified_base 2: mod_base = OTHER; note = 2'O-methyl adenosine phosphorothioate
  modified_base 3: mod_base = OTHER; note = 2'-fluoro cytidine
  modified_base 4: mod_base = OTHER; note = 2'O-methyl guanosine
  modified_base 5: mod_base = OTHER; note = 2'-fluoro cytidine
  modified_base 6: mod_base = OTHER; note = 2'O-methyl adenosine
  modified_base 7: mod_base = OTHER; note = 2'-fluoro guanosine
  modified_base 8: mod_base = OTHER; note = 2'O-methyl adenosine
  modified_base 9: mod_base = OTHER; note = 2'-fluoro guanosine
  modified_base 10: mod_base = OTHER; note = 2'O-methyl cytidine
  modified_base 11: mod_base = OTHER; note = 2'-fluoro guanosine
  modified_base 12: mod_base = OTHER; note = 2'O-methyl cytidine
  modified_base 13: mod_base = OTHER; note = 2'-fluoro guanosine
  modified_base 14: mod_base = OTHER; note = 2'O-methyl guanosine
  modified_base 15: mod_base = OTHER; note = 2'-fluoro cytidine
  modified_base 16: mod_base = OTHER; note = 2'O-methyl uridine
  modified_base 17: mod_base = OTHER; note = 2'-fluoro guanosine
  modified_base 18: mod_base = OTHER; note = 2'O-methyl guanosine
  modified_base 19: mod_base = OTHER; note = 2'-fluoro adenosine phosphorothioate
  modified_base 20: mod_base = OTHER; note = 2'O-methyl uridine phosphorothioate
  modified_base 21: mod_base = OTHER; note = 2'O-methyl uridine
gacgcagagcgcggctggatt

SEQ ID NO: 909 - RNA, 21 nt, synthetic construct
  source 1..21: mol_type = other RNA
  modified_base 1: mod_base = OTHER; note = 2'-fluoro guanosine phosphorothioate
  modified_base 2: mod_base = OTHER; note = 2'O-methyl cytidine phosphorothioate
  modified_base 3: mod_base = OTHER; note = 2'-fluoro adenosine
  modified_base 4: mod_base = OTHER; note = 2'O-methyl guanosine
  modified_base 5: mod_base = OTHER; note = 2'-fluoro adenosine
  modified_base 6: mod_base = OTHER; note = 2'O-methyl guanosine
  modified_base 7: mod_base = OTHER; note = 2'-fluoro cytidine
  modified_base 8: mod_base = OTHER; note = 2'O-methyl guanosine
  modified_base 9: mod_base = OTHER; note = 2'-fluoro cytidine
  modified_base 10: mod_base = OTHER; note = 2'O-methyl guanosine
  modified_base 11: mod_base = OTHER; note = 2'-fluoro guanosine
  modified_base 12: mod_base = OTHER; note = 2'O-methyl cytidine
  modified_base 13: mod_base = OTHER; note = 2'-fluoro uridine
  modified_base 14: mod_base = OTHER; note = 2'O-methyl guanosine
  modified_base 15: mod_base = OTHER; note = 2'-fluoro guanosine
  modified_base 16: mod_base = OTHER; note = 2'O-methyl adenosine
  modified_base 17: mod_base = OTHER; note = 2'-fluoro guanosine
  modified_base 18: mod_base = OTHER; note = 2'O-methyl cytidine
  modified_base 19: mod_base = OTHER; note = 2'-fluoro uridine phosphorothioate
  modified_base 20: mod_base = OTHER; note = 2'O-methyl uridine phosphorothioate
  modified_base 21: mod_base = OTHER; note = 2'O-methyl uridine
gcagagcgcggctggagcttt

SEQ ID NO: 910 - RNA, 21 nt, synthetic construct
  source 1..21: mol_type = other RNA
  modified_base 1: mod_base = OTHER; note = 2'-fluoro cytidine phosphorothioate
  modified_base 2: mod_base = OTHER; note = 2'O-methyl adenosine phosphorothioate
  modified_base 3: mod_base = OTHER; note = 2'-fluoro guanosine
  modified_base 4: mod_base = OTHER; note = 2'O-methyl adenosine
  modified_base 5: mod_base = OTHER; note = 2'-fluoro guanosine
  modified_base 6: mod_base = OTHER; note = 2'O-methyl cytidine
  modified_base 7: mod_base = OTHER; note = 2'-fluoro guanosine
  modified_base 8: mod_base = OTHER; note = 2'O-methyl cytidine
  modified_base 9: mod_base = OTHER; note = 2'-fluoro guanosine
  modified_base 10: mod_base = OTHER; note = 2'O-methyl guanosine
  modified_base 11: mod_base = OTHER; note = 2'-fluoro cytidine
  modified_base 12: mod_base = OTHER; note = 2'O-methyl uridine
  modified_base 13: mod_base = OTHER; note = 2'-fluoro guanosine
  modified_base 14: mod_base = OTHER; note = 2'O-methyl guanosine
  modified_base 15: mod_base = OTHER; note = 2'-fluoro adenosine
  modified_base 16: mod_base = OTHER; note = 2'O-methyl guanosine
  modified_base 17: mod_base = OTHER; note = 2'-fluoro cytidine
  modified_base 18: mod_base = OTHER; note = 2'O-methyl uridine
  modified_base 19: mod_base = OTHER; note = 2'-fluoro uridine phosphorothioate
  modified_base 20: mod_base = OTHER; note = 2'O-methyl uridine phosphorothioate
  modified_base 21: mod_base = OTHER; note = 2'O-methyl uridine
cagagcgcggctggagctttt

SEQ ID NO: 911 - RNA, 21 nt, synthetic construct
  source 1..21: mol_type = other RNA
  modified_base 1: mod_base = OTHER; note = 2'-fluoro adenosine phosphorothioate
  modified_base 2: mod_base = OTHER; note = 2'O-methyl guanosine phosphorothioate
  modified_base 3: mod_base = OTHER; note = 2'-fluoro adenosine
  modified_base 4: mod_base = OTHER; note = 2'O-methyl guanosine
  modified_base 5: mod_base = OTHER; note = 2'-fluoro cytidine
  modified_base 6: mod_base = OTHER; note = 2'O-methyl guanosine
  modified_base 7: mod_base = OTHER; note = 2'-fluoro cytidine
  modified_base 8: mod_base = OTHER; note = 2'O-methyl guanosine
  modified_base 9: mod_base = OTHER; note = 2'-fluoro guanosine
  modified_base 10: mod_base = OTHER; note = 2'O-methyl cytidine
  modified_base 11: mod_base = OTHER; note = 2'-fluoro uridine
  modified_base 12: mod_base = OTHER; note = 2'O-methyl guanosine
  modified_base 13: mod_base = OTHER; note = 2'-fluoro guanosine
  modified_base 14: mod_base = OTHER; note = 2'O-methyl adenosine
  modified_base 15: mod_base = OTHER; note = 2'-fluoro guanosine
  modified_base 16: mod_base = OTHER; note = 2'O-methyl cytidine
  modified_base 17: mod_base = OTHER; note = 2'-fluoro uridine
  modified_base 18: mod_base = OTHER; note = 2'O-methyl uridine
  modified_base 19: mod_base = OTHER; note = 2'-fluoro guanosine phosphorothioate
  modified_base 20: mod_base = OTHER; note = 2'O-methyl uridine phosphorothioate
  modified_base 21: mod_base = OTHER; note = 2'O-methyl uridine
agagcgcggctggagcttgtt

SEQ ID NO: 912 - RNA, 21 nt, synthetic construct
  source 1..21: mol_type = other RNA
  modified_base 1: mod_base = OTHER; note = 2'-fluoro guanosine phosphorothioate
  modified_base 2: mod_base = OTHER; note = 2'O-methyl adenosine phosphorothioate
  modified_base 3: mod_base = OTHER; note = 2'-fluoro guanosine
  modified_base 4: mod_base = OTHER; note = 2'O-methyl cytidine
  modified_base 5: mod_base = OTHER; note = 2'-fluoro guanosine
  modified_base 6: mod_base = OTHER; note = 2'O-methyl cytidine
  modified_base 7: mod_base = OTHER; note = 2'-fluoro guanosine
  modified_base 8: mod_base = OTHER; note = 2'O-methyl guanosine
  modified_base 9: mod_base = OTHER; note = 2'-fluoro cytidine
  modified_base 10: mod_base = OTHER; note = 2'O-methyl uridine
  modified_base 11: mod_base = OTHER; note = 2'-fluoro guanosine
  modified_base 12: mod_base = OTHER; note = 2'O-methyl guanosine
  modified_base 13: mod_base = OTHER; note = 2'-fluoro adenosine
  modified_base 14: mod_base = OTHER; note = 2'O-methyl guanosine
  modified_base 15: mod_base = OTHER; note = 2'-fluoro cytidine
  modified_base 16: mod_base = OTHER; note = 2'O-methyl uridine
  modified_base 17: mod_base = OTHER; note = 2'-fluoro uridine
  modified_base 18: mod_base = OTHER; note = 2'O-methyl guanosine
  modified_base 19: mod_base = OTHER; note = 2'-fluoro uridine phosphorothioate
  modified_base 20: mod_base = OTHER; note = 2'O-methyl uridine phosphorothioate
  modified_base 21: mod_base = OTHER; note = 2'O-methyl uridine
gagcgcggctggagcttgttt

SEQ ID NO: 913 - RNA, 21 nt, synthetic construct
  source 1..21: mol_type = other RNA
  modified_base 1: mod_base = OTHER; note = 2'-fluoro guanosine phosphorothioate
  modified_base 2: mod_base = OTHER; note = 2'O-methyl cytidine phosphorothioate
  modified_base 3: mod_base = OTHER; note = 2'-fluoro guanosine
  modified_base 4: mod_base = OTHER; note = 2'O-methyl cytidine
  modified_base 5: mod_base = OTHER; note = 2'-fluoro guanosine
  modified_base 6: mod_base = OTHER; note = 2'O-methyl guanosine
  modified_base 7: mod_base = OTHER; note = 2'-fluoro cytidine
  modified_base 8: mod_base = OTHER; note = 2'O-methyl uridine
  modified_base 9: mod_base = OTHER; note = 2'-fluoro guanosine
  modified_base 10: mod_base = OTHER; note = 2'O-methyl guanosine
  modified_base 11: mod_base = OTHER; note = 2'-fluoro adenosine
  modified_base 12: mod_base = OTHER; note = 2'O-methyl guanosine
  modified_base 13: mod_base = OTHER; note = 2'-fluoro cytidine
  modified_base 14: mod_base = OTHER; note = 2'O-methyl uridine
  modified_base 15: mod_base = OTHER; note = 2'-fluoro uridine
  modified_base 16: mod_base = OTHER; note = 2'O-methyl guanosine
  modified_base 17: mod_base = OTHER; note = 2'-fluoro uridine
  modified_base 18: mod_base = OTHER; note = 2'O-methyl cytidine
  modified_base 19: mod_base = OTHER; note = 2'-fluoro cytidine phosphorothioate
  modified_base 20: mod_base = OTHER; note = 2'O-methyl uridine phosphorothioate
  modified_base 21: mod_base = OTHER; note = 2'O-methyl uridine
gcgcggctggagcttgtcctt

SEQ ID NO: 914 - RNA, 21 nt, synthetic construct
  source 1..21: mol_type = other RNA
  modified_base 1: mod_base = OTHER; note = 2'-fluoro cytidine phosphorothioate
  modified_base 2: mod_base = OTHER; note = 2'O-methyl guanosine phosphorothioate
  modified_base 3: mod_base = OTHER; note = 2'-fluoro cytidine
  modified_base 4: mod_base = OTHER; note = 2'O-methyl guanosine
  modified_base 5: mod_base = OTHER; note = 2'-fluoro guanosine
  modified_base 6: mod_base = OTHER; note = 2'O-methyl cytidine
  modified_base 7: mod_base = OTHER; note = 2'-fluoro uridine
  modified_base 8: mod_base = OTHER; note = 2'O-methyl guanosine
  modified_base 9: mod_base = OTHER; note = 2'-fluoro guanosine
  modified_base 10: mod_base = OTHER; note = 2'O-methyl adenosine
  modified_base 11: mod_base = OTHER; note = 2'-fluoro guanosine
  modified_base 12: mod_base = OTHER; note = 2'O-methyl cytidine
  modified_base 13: mod_base = OTHER; note = 2'-fluoro uridine
  modified_base 14: mod_base = OTHER; note = 2'O-methyl uridine
  modified_base 15: mod_base = OTHER; note = 2'-fluoro guanosine
  modified_base 16: mod_base = OTHER; note = 2'O-methyl uridine
  modified_base 17: mod_base = OTHER; note = 2'-fluoro cytidine
  modified_base 18: mod_base = OTHER; note = 2'O-methyl cytidine
  modified_base 19: mod_base = OTHER; note = 2'-fluoro uridine phosphorothioate
  modified_base 20: mod_base = OTHER; note = 2'O-methyl uridine phosphorothioate
  modified_base 21: mod_base = OTHER; note = 2'O-methyl uridine
cgcggctggagcttgtccttt

SEQ ID NO: 915 - RNA, 21 nt, synthetic construct
  source 1..21: mol_type = other RNA
  modified_base 1: mod_base = OTHER; note = 2'-fluoro guanosine phosphorothioate
  modified_base 2: mod_base = OTHER; note = 2'O-methyl cytidine phosphorothioate
  modified_base 3: mod_base = OTHER; note = 2'-fluoro guanosine
  modified_base 4: mod_base = OTHER; note = 2'O-methyl guanosine
  modified_base 5: mod_base = OTHER; note = 2'-fluoro cytidine
  modified_base 6: mod_base = OTHER; note = 2'O-methyl uridine
  modified_base 7: mod_base = OTHER; note = 2'-fluoro guanosine
  modified_base 8: mod_base = OTHER; note = 2'O-methyl guanosine
  modified_base 9: mod_base = OTHER; note = 2'-fluoro adenosine
  modified_base 10: mod_base = OTHER; note = 2'O-methyl guanosine
  modified_base 11: mod_base = OTHER; note = 2'-fluoro cytidine
  modified_base 12: mod_base = OTHER; note = 2'O-methyl uridine
  modified_base 13: mod_base = OTHER; note = 2'-fluoro uridine
  modified_base 14: mod_base = OTHER; note = 2'O-methyl guanosine
  modified_base 15: mod_base = OTHER; note = 2'-fluoro uridine
  modified_base 16: mod_base = OTHER; note = 2'O-methyl cytidine
  modified_base 17: mod_base = OTHER; note = 2'-fluoro cytidine
  modified_base 18: mod_base = OTHER; note = 2'O-methyl uridine
  modified_base 19: mod_base = OTHER; note = 2'-fluoro uridine phosphorothioate
  modified_base 20: mod_base = OTHER; note = 2'O-methyl uridine phosphorothioate
  modified_base 21: mod_base = OTHER; note = 2'O-methyl uridine
gcggctggagcttgtcctttt

SEQ ID NO: 916 - RNA, 21 nt, synthetic construct
  source 1..21: mol_type = other RNA
  modified_base 1: mod_base = OTHER; note = 2'-fluoro guanosine phosphorothioate
  modified_base 2: mod_base = OTHER; note = 2'O-methyl cytidine phosphorothioate
  modified_base 3: mod_base = OTHER; note = 2'-fluoro uridine
  modified_base 4: mod_base = OTHER; note = 2'O-methyl guanosine
  modified_base 5: mod_base = OTHER; note = 2'-fluoro guanosine
  modified_base 6: mod_base = OTHER; note = 2'O-methyl adenosine
  modified_base 7: mod_base = OTHER; note = 2'-fluoro guanosine
  modified_base 8: mod_base = OTHER; note = 2'O-methyl cytidine
  modified_base 9: mod_base = OTHER; note = 2'-fluoro uridine
  modified_base 10: mod_base = OTHER; note = 2'O-methyl uridine
  modified_base 11: mod_base = OTHER; note = 2'-fluoro guanosine
  modified_base 12: mod_base = OTHER; note = 2'O-methyl uridine
  modified_base 13: mod_base = OTHER; note = 2'-fluoro cytidine
  modified_base 14: mod_base = OTHER; note = 2'O-methyl cytidine
  modified_base 15: mod_base = OTHER; note = 2'-fluoro uridine
  modified_base 16: mod_base = OTHER; note = 2'O-methyl uridine
  modified_base 17: mod_base = OTHER; note = 2'-fluoro cytidine
  modified_base 18: mod_base = OTHER; note = 2'O-methyl guanosine
  modified_base 19: mod_base = OTHER; note = 2'-fluoro cytidine phosphorothioate
  modified_base 20: mod_base = OTHER; note = 2'O-methyl uridine phosphorothioate
  modified_base 21: mod_base = OTHER; note = 2'O-methyl uridine
gctggagcttgtccttcgctt

SEQ ID NO: 917 - RNA, 21 nt, synthetic construct
  source 1..21: mol_type = other RNA
  modified_base 1: mod_base = OTHER; note = 2'-fluoro uridine phosphorothioate
  modified_base 2: mod_base = OTHER; note = 2'O-methyl guanosine phosphorothioate
  modified_base 3: mod_base = OTHER; note = 2'-fluoro guanosine
  modified_base 4: mod_base = OTHER; note = 2'O-methyl adenosine
  modified_base 5: mod_base = OTHER; note = 2'-fluoro guanosine
  modified_base 6: mod_base = OTHER; note = 2'O-methyl cytidine
  modified_base 7: mod_base = OTHER; note = 2'-fluoro uridine
  modified_base 8: mod_base = OTHER; note = 2'O-methyl uridine
  modified_base 9: mod_base = OTHER; note = 2'-fluoro guanosine
  modified_base 10: mod_base = OTHER; note = 2'O-methyl uridine
  modified_base 11: mod_base = OTHER; note = 2'-fluoro cytidine
  modified_base 12: mod_base = OTHER; note = 2'O-methyl cytidine
  modified_base 13: mod_base = OTHER; note = 2'-fluoro uridine
  modified_base 14: mod_base = OTHER; note = 2'O-methyl uridine
  modified_base 15: mod_base = OTHER; note = 2'-fluoro cytidine
  modified_base 16: mod_base = OTHER; note = 2'O-methyl guanosine
  modified_base 17: mod_base = OTHER; note = 2'-fluoro cytidine
  modified_base 18: mod_base = OTHER; note = 2'O-methyl guanosine
  modified_base 19: mod_base = OTHER; note = 2'-fluoro guanosine phosphorothioate
  modified_base 20: mod_base = OTHER; note = 2'O-methyl uridine phosphorothioate
  modified_base 21: mod_base = OTHER; note = 2'O-methyl uridine
tggagcttgtccttcgcggtt

SEQ ID NO: 918 - RNA, 21 nt, synthetic construct
  source 1..21: mol_type = other RNA
  modified_base 1: mod_base = OTHER; note = 2'-fluoro guanosine phosphorothioate
  modified_base 2: mod_base = OTHER; note = 2'O-methyl guanosine phosphorothioate
  modified_base 3: mod_base = OTHER; note = 2'-fluoro adenosine
  modified_base 4: mod_base = OTHER; note = 2'O-methyl guanosine
  modified_base 5: mod_base = OTHER; note = 2'-fluoro cytidine
  modified_base 6: mod_base = OTHER; note = 2'O-methyl uridine
  modified_base 7: mod_base = OTHER; note = 2'-fluoro uridine
  modified_base 8: mod_base = OTHER; note = 2'O-methyl guanosine
  modified_base 9: mod_base = OTHER; note = 2'-fluoro uridine
  modified_base 10: mod_base = OTHER; note = 2'O-methyl cytidine
  modified_base 11: mod_base = OTHER; note = 2'-fluoro cytidine
  modified_base 12: mod_base = OTHER; note = 2'O-methyl uridine
  modified_base 13: mod_base = OTHER; note = 2'-fluoro uridine
  modified_base 14: mod_base = OTHER; note = 2'O-methyl cytidine
  modified_base 15: mod_base = OTHER; note = 2'-fluoro guanosine
  modified_base 16: mod_base = OTHER; note = 2'O-methyl cytidine
  modified_base 17: mod_base = OTHER; note = 2'-fluoro guanosine
  modified_base 18: mod_base = OTHER; note = 2'O-methyl guanosine
  modified_base 19: mod_base = OTHER; note = 2'-fluoro guanosine phosphorothioate
  modified_base 20: mod_base = OTHER; note = 2'O-methyl uridine phosphorothioate
  modified_base 21: mod_base = OTHER; note = 2'O-methyl uridine
ggagcttgtccttcgcgggtt

SEQ ID NO: 919 - RNA, 21 nt, synthetic construct
  source 1..21: mol_type = other RNA
  modified_base 1: mod_base = OTHER; note = 2'-fluoro guanosine phosphorothioate
  modified_base 2: mod_base = OTHER; note = 2'O-methyl adenosine phosphorothioate
  modified_base 3: mod_base = OTHER; note = 2'-fluoro guanosine
  modified_base 4: mod_base = OTHER; note = 2'O-methyl cytidine
  modified_base 5: mod_base = OTHER; note = 2'-fluoro uridine
  modified_base 6: mod_base = OTHER; note = 2'O-methyl uridine
  modified_base 7: mod_base = OTHER; note = 2'-fluoro guanosine
  modified_base 8: mod_base = OTHER; note = 2'O-methyl uridine
  modified_base 9: mod_base = OTHER; note = 2'-fluoro cytidine
  modified_base 10: mod_base = OTHER; note = 2'O-methyl cytidine
  modified_base 11: mod_base = OTHER; note = 2'-fluoro uridine
  modified_base 12: mod_base = OTHER; note = 2'O-methyl uridine
  modified_base 13: mod_base = OTHER; note = 2'-fluoro cytidine
  modified_base 14: mod_base = OTHER; note = 2'O-methyl guanosine
  modified_base 15: mod_base = OTHER; note = 2'-fluoro cytidine
  modified_base 16: mod_base = OTHER; note = 2'O-methyl guanosine
  modified_base 17: mod_base = OTHER; note = 2'-fluoro guanosine
  modified_base 18: mod_base = OTHER; note = 2'O-methyl guanosine
  modified_base 19: mod_base = OTHER; note = 2'-fluoro cytidine phosphorothioate
  modified_base 20: mod_base = OTHER; note = 2'O-methyl uridine phosphorothioate
  modified_base 21: mod_base = OTHER; note = 2'O-methyl uridine
gagcttgtccttcgcgggctt

SEQ ID NO: 920 - RNA, 21 nt, synthetic construct
  source 1..21: mol_type = other RNA
  modified_base 1: mod_base = OTHER; note = 2'-fluoro adenosine phosphorothioate
  modified_base 2: mod_base = OTHER; note = 2'O-methyl guanosine phosphorothioate
  modified_base 3: mod_base = OTHER; note = 2'-fluoro cytidine
  modified_base 4: mod_base = OTHER; note = 2'O-methyl uridine
  modified_base 5: mod_base = OTHER; note = 2'-fluoro uridine
  modified_base 6: mod_base = OTHER; note = 2'O-methyl guanosine
  modified_base 7: mod_base = OTHER; note = 2'-fluoro uridine
  modified_base 8: mod_base = OTHER; note = 2'O-methyl cytidine
  modified_base 9: mod_base = OTHER; note = 2'-fluoro cytidine
  modified_base 10: mod_base = OTHER; note = 2'O-methyl uridine
  modified_base 11: mod_base = OTHER; note = 2'-fluoro uridine
  modified_base 12: mod_base = OTHER; note = 2'O-methyl cytidine
  modified_base 13: mod_base = OTHER; note = 2'-fluoro guanosine
  modified_base 14: mod_base = OTHER; note = 2'O-methyl cytidine
  modified_base 15: mod_base = OTHER; note = 2'-fluoro guanosine
  modified_base 16: mod_base = OTHER; note = 2'O-methyl guanosine
  modified_base 17: mod_base = OTHER; note = 2'-fluoro guanosine
  modified_base 18: mod_base = OTHER; note = 2'O-methyl cytidine
  modified_base 19: mod_base = OTHER; note = 2'-fluoro uridine phosphorothioate
  modified_base 20: mod_base = OTHER; note = 2'O-methyl uridine phosphorothioate
  modified_base 21: mod_base = OTHER; note = 2'O-methyl uridine
agcttgtccttcgcgggcttt

SEQ ID NO: 921 - RNA, 21 nt, synthetic construct
  source 1..21: mol_type = other RNA
  modified_base 1: mod_base = OTHER; note = 2'-fluoro guanosine phosphorothioate
  modified_base 2: mod_base = OTHER; note = 2'O-methyl uridine phosphorothioate
  modified_base 3: mod_base = OTHER; note = 2'-fluoro cytidine
  modified_base 4: mod_base = OTHER; note = 2'O-methyl cytidine
  modified_base 5: mod_base = OTHER; note = 2'-fluoro uridine
  modified_base 6: mod_base = OTHER; note = 2'O-methyl uridine
  modified_base 7: mod_base = OTHER; note = 2'-fluoro cytidine
  modified_base 8: mod_base = OTHER; note = 2'O-methyl guanosine
  modified_base 9: mod_base = OTHER; note = 2'-fluoro cytidine
  modified_base 10: mod_base = OTHER; note = 2'O-methyl guanosine
  modified_base 11: mod_base = OTHER; note = 2'-fluoro guanosine
  modified_base 12: mod_base = OTHER; note = 2'O-methyl guanosine
  modified_base 13: mod_base = OTHER; note = 2'-fluoro cytidine
  modified_base 14: mod_base = OTHER; note = 2'O-methyl uridine
  modified_base 15: mod_base = OTHER; note = 2'-fluoro guanosine
  modified_base 16: mod_base = OTHER; note = 2'O-methyl cytidine
  modified_base 17: mod_base = OTHER; note = 2'-fluoro guanosine
  modified_base 18: mod_base = OTHER; note = 2'O-methyl guanosine
  modified_base 19: mod_base = OTHER; note = 2'-fluoro cytidine phosphorothioate
  modified_base 20: mod_base = OTHER; note = 2'O-methyl uridine phosphorothioate
  modified_base 21: mod_base = OTHER; note = 2'O-methyl uridine
gtccttcgcgggctgcggctt

SEQ ID NO: 922 - RNA, 21 nt, synthetic construct
  source 1..21: mol_type = other RNA
  modified_base 1: mod_base = OTHER; note = 2'-fluoro guanosine phosphorothioate
  modified_base 2: mod_base = OTHER; note = 2'O-methyl cytidine phosphorothioate
  modified_base 3: mod_base = OTHER; note = 2'-fluoro uridine
  modified_base 4: mod_base = OTHER; note = 2'O-methyl guanosine
  modified_base 5: mod_base = OTHER; note = 2'-fluoro cytidine
  modified_base 6: mod_base = OTHER; note = 2'O-methyl guanosine
  modified_base 7: mod_base = OTHER; note = 2'-fluoro guanosine
  modified_base 8: mod_base = OTHER; note = 2'O-methyl cytidine
  modified_base 9: mod_base = OTHER; note = 2'-fluoro uridine
  modified_base 10: mod_base = OTHER; note = 2'O-methyl uridine
  modified_base 11: mod_base = OTHER; note = 2'-fluoro cytidine
  modified_base 12: mod_base = OTHER; note = 2'O-methyl cytidine
  modified_base 13: mod_base = OTHER; note = 2'-fluoro uridine
  modified_base 14: mod_base = OTHER; note = 2'O-methyl guanosine
  modified_base 15: mod_base = OTHER; note = 2'-fluoro guanosine
  modified_base 16: mod_base = OTHER; note = 2'O-methyl guanosine
  modified_base 17: mod_base = OTHER; note = 2'-fluoro cytidine
  modified_base 18: mod_base = OTHER; note = 2'O-methyl uridine
  modified_base 19: mod_base = OTHER; note = 2'-fluoro uridine phosphorothioate
  modified_base 20: mod_base = OTHER; note = 2'O-methyl uridine phosphorothioate
  modified_base 21: mod_base = OTHER; note = 2'O-methyl uridine
gctgcggcttcctgggctttt

SEQ ID NO: 923 - RNA, 21 nt, synthetic construct
  source 1..21: mol_type = other RNA
  modified_base 1: mod_base = OTHER; note = 2'-fluoro cytidine phosphorothioate
  modified_base 2: mod_base = OTHER; note = 2'O-methyl uridine phosphorothioate
  modified_base 3: mod_base = OTHER; note = 2'-fluoro guanosine
  modified_base 4: mod_base = OTHER; note = 2'O-methyl cytidine
  modified_base 5: mod_base = OTHER; note = 2'-fluoro guanosine
  modified_base 6: mod_base = OTHER; note = 2'O-methyl guanosine
  modified_base 7: mod_base = OTHER; note = 2'-fluoro cytidine
  modified_base 8: mod_base = OTHER; note = 2'O-methyl uridine
  modified_base 9: mod_base = OTHER; note = 2'-fluoro uridine
  modified_base 10: mod_base = OTHER; note = 2'O-methyl cytidine
  modified_base 11: mod_base = OTHER; note = 2'-fluoro cytidine
  modified_base 12: mod_base = OTHER; note = 2'O-methyl uridine
  modified_base 13: mod_base = OTHER; note = 2'-fluoro guanosine
  modified_base 14: mod_base = OTHER; note = 2'O-methyl guanosine
  modified_base 15: mod_base = OTHER; note = 2'-fluoro guanosine
  modified_base 16: mod_base = OTHER; note = 2'O-methyl cytidine
  modified_base 17: mod_base = OTHER; note = 2'-fluoro uridine
  modified_base 18: mod_base = OTHER; note = 2'O-methyl uridine
  modified_base 19: mod_base = OTHER; note = 2'-fluoro cytidine phosphorothioate
  modified_base 20: mod_base = OTHER; note = 2'O-methyl uridine phosphorothioate
  modified_base 21: mod_base = OTHER; note = 2'O-methyl uridine
ctgcggcttcctgggcttctt

SEQ ID NO: 924 - RNA, 21 nt, synthetic construct
  source 1..21: mol_type = other RNA
  modified_base 1: mod_base = OTHER; note = 2'-fluoro cytidine phosphorothioate
  modified_base 2: mod_base = OTHER; note = 2'O-methyl guanosine phosphorothioate
  modified_base 3: mod_base = OTHER; note = 2'-fluoro guanosine
  modified_base 4: mod_base = OTHER; note = 2'O-methyl cytidine
  modified_base 5: mod_base = OTHER; note = 2'-fluoro uridine
  modified_base 6: mod_base = OTHER; note = 2'O-methyl uridine
  modified_base 7: mod_base = OTHER; note = 2'-fluoro cytidine
  modified_base 8: mod_base = OTHER; note = 2'O-methyl cytidine
  modified_base 9: mod_base = OTHER; note = 2'-fluoro uridine
  modified_base 10: mod_base = OTHER; note = 2'O-methyl guanosine
  modified_base 11: mod_base = OTHER; note = 2'-fluoro guanosine
  modified_base 12: mod_base = OTHER; note = 2'O-methyl guanosine
  modified_base 13: mod_base = OTHER; note = 2'-fluoro cytidine
  modified_base 14: mod_base = OTHER; note = 2'O-methyl uridine
  modified_base 15: mod_base = OTHER; note = 2'-fluoro uridine
  modified_base 16: mod_base = OTHER; note = 2'O-methyl cytidine
  modified_base 17: mod_base = OTHER; note = 2'-fluoro uridine
  modified_base 18: mod_base = OTHER; note = 2'O-methyl adenosine
  modified_base 19: mod_base = OTHER; note = 2'-fluoro cytidine phosphorothioate
  modified_base 20: mod_base = OTHER; note = 2'O-methyl uridine phosphorothioate
  modified_base 21: mod_base = OTHER; note = 2'O-methyl uridine
cggcttcctgggcttctactt

SEQ ID NO: 925 - RNA, 21 nt, synthetic construct
  source 1..21: mol_type = other RNA
  modified_base 1: mod_base = OTHER; note = 2'-fluoro cytidine phosphorothioate
  modified_base 2: mod_base = OTHER; note = 2'O-methyl uridine phosphorothioate
  modified_base 3: mod_base = OTHER; note = 2'-fluoro guanosine
  modified_base 4: mod_base = OTHER; note = 2'O-methyl guanosine
  modified_base 5: mod_base = OTHER; note = 2'-fluoro guanosine
  modified_base 6: mod_base = OTHER; note = 2'O-methyl cytidine
  modified_base 7: mod_base = OTHER; note = 2'-fluoro uridine
  modified_base 8: mod_base = OTHER; note = 2'O-methyl uridine
  modified_base 9: mod_base = OTHER; note = 2'-fluoro cytidine
  modified_base 10: mod_base = OTHER; note = 2'O-methyl uridine
  modified_base 11: mod_base = OTHER; note = 2'-fluoro adenosine
  modified_base 12: mod_base = OTHER; note = 2'O-methyl cytidine
  modified_base 13: mod_base = OTHER; note = 2'-fluoro cytidine
  modified_base 14: mod_base = OTHER; note = 2'O-methyl adenosine
  modified_base 15: mod_base = OTHER; note = 2'-fluoro cytidine
  modified_base 16: mod_base = OTHER; note = 2'O-methyl guanosine
  modified_base 17: mod_base = OTHER; note = 2'-fluoro uridine
  modified_base 18: mod_base = OTHER; note = 2'O-methyl cytidine
  modified_base 19: mod_base = OTHER; note = 2'-fluoro guanosine phosphorothioate
  modified_base 20: mod_base = OTHER; note = 2'O-methyl uridine phosphorothioate
  modified_base 21: mod_base = OTHER; note = 2'O-methyl uridine
ctgggcttctaccacgtcgtt

SEQ ID NO: 926 - RNA, 21 nt, synthetic construct
  source 1..21: mol_type = other RNA
  modified_base 1: mod_base = OTHER; note = 2'-fluoro uridine phosphorothioate
  modified_base 2: mod_base = OTHER; note = 2'O-methyl guanosine phosphorothioate
  modified_base 3: mod_base = OTHER; note = 2'-fluoro guanosine
  modified_base 4: mod_base = OTHER; note = 2'O-methyl guanosine
  modified_base 5: mod_base = OTHER; note = 2'-fluoro cytidine
  modified_base 6: mod_base = OTHER; note = 2'O-methyl uridine
  modified_base 7: mod_base = OTHER; note = 2'-fluoro uridine
  modified_base 8: mod_base = OTHER; note = 2'O-methyl cytidine
  modified_base 9: mod_base = OTHER; note = 2'-fluoro uridine
  modified_base 10: mod_base = OTHER; note = 2'O-methyl adenosine
  modified_base 11: mod_base = OTHER; note = 2'-fluoro cytidine
  modified_base 12: mod_base = OTHER; note = 2'O-methyl cytidine
  modified_base 13: mod_base = OTHER; note = 2'-fluoro adenosine
  modified_base 14: mod_base = OTHER; note = 2'O-methyl cytidine
  modified_base 15: mod_base = OTHER; note = 2'-fluoro guanosine
  modified_base 16: mod_base = OTHER; note = 2'O-methyl uridine
  modified_base 17: mod_base = OTHER; note = 2'-fluoro cytidine
  modified_base 18: mod_base = OTHER; note = 2'O-methyl guanosine
  modified_base 19: mod_base = OTHER; note = 2'-fluoro guanosine phosphorothioate
  modified_base 20: mod_base = OTHER; note = 2'O-methyl uridine phosphorothioate
  modified_base 21: mod_base = OTHER; note = 2'O-methyl uridine
tgggcttctaccacgtcggtt

SEQ ID NO: 927 - RNA, 21 nt, synthetic construct
  source 1..21: mol_type = other RNA
  modified_base 1: mod_base = OTHER; note = 2'-fluoro guanosine phosphorothioate
  modified_base 2: mod_base = OTHER; note = 2'O-methyl guanosine phosphorothioate
  modified_base 3: mod_base = OTHER; note = 2'-fluoro cytidine
  modified_base 4: mod_base = OTHER; note = 2'O-methyl uridine
  modified_base 5: mod_base = OTHER; note = 2'-fluoro uridine
  modified_base 6: mod_base = OTHER; note = 2'O-methyl cytidine
  modified_base 7: mod_base = OTHER; note = 2'-fluoro uridine
  modified_base 8: mod_base = OTHER; note = 2'O-methyl adenosine
  modified_base 9: mod_base = OTHER; note = 2'-fluoro cytidine
  modified_base 10: mod_base = OTHER; note = 2'O-methyl cytidine
  modified_base 11: mod_base = OTHER; note = 2'-fluoro adenosine
  modified_base 12: mod_base = OTHER; note = 2'O-methyl cytidine
  modified_base 13: mod_base = OTHER; note = 2'-fluoro guanosine
  modified_base 14: mod_base = OTHER; note = 2'O-methyl uridine
  modified_base 15: mod_base = OTHER; note = 2'-fluoro cytidine
  modified_base 16: mod_base = OTHER; note = 2'O-methyl guanosine
  modified_base 17: mod_base = OTHER; note = 2'-fluoro guanosine
  modified_base 18: mod_base = OTHER; note = 2'O-methyl guanosine
  modified_base 19: mod_base = OTHER; note = 2'-fluoro guanosine phosphorothioate
  modified_base 20: mod_base = OTHER; note = 2'O-methyl uridine phosphorothioate
  modified_base 21: mod_base = OTHER; note = 2'O-methyl uridine
ggcttctaccacgtcggggtt

SEQ ID NO: 928 - RNA, 21 nt, synthetic construct
  source 1..21: mol_type = other RNA
  modified_base 1: mod_base = OTHER; note = 2'-fluoro guanosine phosphorothioate
  modified_base 2: mod_base = OTHER; note = 2'O-methyl cytidine phosphorothioate
  modified_base 3: mod_base = OTHER; note = 2'-fluoro uridine
  modified_base 4: mod_base = OTHER; note = 2'O-methyl uridine
  modified_base 5: mod_base = OTHER; note = 2'-fluoro cytidine
  modified_base 6: mod_base = OTHER; note = 2'O-methyl uridine
  modified_base 7: mod_base = OTHER; note = 2'-fluoro adenosine
  modified_base 8: mod_base = OTHER; note = 2'O-methyl cytidine
  modified_base 9: mod_base = OTHER; note = 2'-fluoro cytidine
  modified_base 10: mod_base = OTHER; note = 2'O-methyl adenosine
  modified_base 11: mod_base = OTHER; note = 2'-fluoro cytidine
  modified_base 12: mod_base = OTHER; note = 2'O-methyl guanosine
  modified_base 13: mod_base = OTHER; note = 2'-fluoro uridine
  modified_base 14: mod_base = OTHER; note = 2'O-methyl cytidine
  modified_base 15: mod_base = OTHER; note = 2'-fluoro guanosine
  modified_base 16: mod_base = OTHER; note = 2'O-methyl guanosine
  modified_base 17: mod_base = OTHER; note = 2'-fluoro guanosine
  modified_base 18: mod_base = OTHER; note = 2'O-methyl guanosine
  modified_base 19: mod_base = OTHER; note = 2'-fluoro cytidine phosphorothioate
  modified_base 20: mod_base = OTHER; note = 2'O-methyl uridine phosphorothioate
  modified_base 21: mod_base = OTHER; note = 2'O-methyl uridine
gcttctaccacgtcggggctt

SEQ ID NO: 929 - RNA, 21 nt, synthetic construct
  source 1..21: mol_type = other RNA
  modified_base 1: mod_base = OTHER; note = 2'-fluoro cytidine phosphorothioate
  modified_base 2: mod_base = OTHER; note = 2'O-methyl uridine phosphorothioate
  modified_base 3: mod_base = OTHER; note = 2'-fluoro uridine
  modified_base 4: mod_base = OTHER; note = 2'O-methyl cytidine
  modified_base 5: mod_base = OTHER; note = 2'-fluoro uridine
  modified_base 6: mod_base = OTHER; note = 2'O-methyl adenosine
  modified_base 7: mod_base = OTHER; note = 2'-fluoro cytidine
  modified_base 8: mod_base = OTHER; note = 2'O-methyl cytidine
  modified_base 9: mod_base = OTHER; note = 2'-fluoro adenosine
  modified_base 10: mod_base = OTHER; note = 2'O-methyl cytidine
  modified_base 11: mod_base = OTHER; note = 2'-fluoro guanosine
  modified_base 12: mod_base = OTHER; note = 2'O-methyl uridine
  modified_base 13: mod_base = OTHER; note = 2'-fluoro cytidine
  modified_base 14: mod_base = OTHER; note = 2'O-methyl guanosine
  modified_base 15: mod_base = OTHER; note = 2'-fluoro guanosine
  modified_base 16: mod_base = OTHER; note = 2'O-methyl guanosine
  modified_base 17: mod_base = OTHER; note = 2'-fluoro guanosine
  modified_base 18: mod_base = OTHER; note = 2'O-methyl cytidine
  modified_base 19: mod_base = OTHER; note = 2'-fluoro guanosine phosphorothioate
  modified_base 20: mod_base = OTHER; note = 2'O-methyl uridine phosphorothioate
  modified_base 21: mod_base = OTHER; note = 2'O-methyl uridine
cttctaccacgtcggggcgtt

SEQ ID NO: 930 - RNA, 21 nt, synthetic construct
  source 1..21: mol_type = other RNA
  modified_base 1: mod_base = OTHER; note = 2'-fluoro uridine phosphorothioate
  modified_base 2: mod_base = OTHER; note = 2'O-methyl uridine phosphorothioate
  modified_base 3: mod_base = OTHER; note = 2'-fluoro cytidine
  modified_base 4: mod_base = OTHER; note = 2'O-methyl uridine
  modified_base 5: mod_base = OTHER; note = 2'-fluoro adenosine
  modified_base 6: mod_base = OTHER; note = 2'O-methyl cytidine
  modified_base 7: mod_base = OTHER; note = 2'-fluoro cytidine
  modified_base 8: mod_base = OTHER; note = 2'O-methyl adenosine
  modified_base 9: mod_base = OTHER; note = 2'-fluoro cytidine
  modified_base 10: mod_base = OTHER; note = 2'O-methyl guanosine
  modified_base 11: mod_base = OTHER; note = 2'-fluoro uridine
  modified_base 12: mod_base = OTHER; note = 2'O-methyl cytidine
  modified_base 13: mod_base = OTHER; note = 2'-fluoro guanosine
  modified_base 14: mod_base = OTHER; note = 2'O-methyl guanosine
  modified_base 15: mod_base = OTHER; note = 2'-fluoro guanosine
  modified_base 16: mod_base = OTHER; note = 2'O-methyl guanosine
  modified_base 17: mod_base = OTHER; note = 2'-fluoro cytidine
  modified_base 18: mod_base = OTHER; note = 2'O-methyl guanosine
  modified_base 19: mod_base = OTHER; note = 2'-fluoro adenosine phosphorothioate
  modified_base 20: mod_base = OTHER; note = 2'O-methyl uridine phosphorothioate
  modified_base 21: mod_base = OTHER; note = 2'O-methyl uridine
ttctaccacgtcggggcgatt

SEQ ID NO: 931 - RNA, 21 nt, synthetic construct
  source 1..21: mol_type = other RNA
  modified_base 1: mod_base = OTHER; note = 2'-fluoro uridine phosphorothioate
  modified_base 2: mod_base = OTHER; note = 2'O-methyl cytidine phosphorothioate
  modified_base 3: mod_base = OTHER; note = 2'-fluoro uridine
  modified_base 4: mod_base = OTHER; note = 2'O-methyl adenosine
  modified_base 5: mod_base = OTHER; note = 2'-fluoro cytidine
  modified_base 6: mod_base = OTHER; note = 2'O-methyl cytidine
  modified_base 7: mod_base = OTHER; note = 2'-fluoro adenosine
  modified_base 8: mod_base = OTHER; note = 2'O-methyl cytidine
  modified_base 9: mod_base = OTHER; note = 2'-fluoro guanosine
  modified_base 10: mod_base = OTHER; note = 2'O-methyl uridine
  modified_base 11: mod_base = OTHER; note = 2'-fluoro cytidine
  modified_base 12: mod_base = OTHER; note = 2'O-methyl guanosine
  modified_base 13: mod_base = OTHER; note = 2'-fluoro guanosine
  modified_base 14: mod_base = OTHER; note = 2'O-methyl guanosine
  modified_base 15: mod_base = OTHER; note = 2'-fluoro guanosine
  modified_base 16: mod_base = OTHER; note = 2'O-methyl cytidine
  modified_base 17: mod_base = OTHER; note = 2'-fluoro guanosine
  modified_base 18: mod_base = OTHER; note = 2'O-methyl adenosine
  modified_base 19: mod_base = OTHER; note = 2'-fluoro cytidine phosphorothioate
  modified_base 20: mod_base = OTHER; note = 2'O-methyl uridine phosphorothioate
  modified_base 21: mod_base = OTHER; note = 2'O-methyl uridine
tctaccacgtcggggcgactt

SEQ ID NO: 932 - RNA, 21 nt, synthetic construct
  source 1..21: mol_type = other RNA
  modified_base 1: mod_base = OTHER; note = 2'-fluoro cytidine phosphorothioate
  modified_base 2: mod_base = OTHER; note = 2'O-methyl uridine phosphorothioate
  modified_base 3: mod_base = OTHER; note = 2'-fluoro adenosine
  modified_base 4: mod_base = OTHER; note = 2'O-methyl cytidine
  modified_base 5: mod_base = OTHER; note = 2'-fluoro cytidine
  modified_base 6: mod_base = OTHER; note = 2'O-methyl adenosine
  modified_base 7: mod_base = OTHER; note = 2'-fluoro cytidine
  modified_base 8: mod_base = OTHER; note = 2'O-methyl guanosine
  modified_base 9: mod_base = OTHER; note = 2'-fluoro uridine
  modified_base 10: mod_base = OTHER; note = 2'O-methyl cytidine
  modified_base 11: mod_base = OTHER; note = 2'-fluoro guanosine
  modified_base 12: mod_base = OTHER; note = 2'O-methyl guanosine
  modified_base 13: mod_base = OTHER; note = 2'-fluoro guanosine
  modified_base 14: mod_base = OTHER; note = 2'O-methyl guanosine
  modified_base 15: mod_base = OTHER; note = 2'-fluoro cytidine
  modified_base 16: mod_base = OTHER; note = 2'O-methyl guanosine
  modified_base 17: mod_base = OTHER; note = 2'-fluoro adenosine
  modified_base 18: mod_base = OTHER; note = 2'O-methyl cytidine
  modified_base 19: mod_base = OTHER; note = 2'-fluoro cytidine phosphorothioate
  modified_base 20: mod_base = OTHER; note = 2'O-methyl uridine phosphorothioate
  modified_base 21: mod_base = OTHER; note = 2'O-methyl uridine
ctaccacgtcggggcgacctt

SEQ ID NO: 933 - RNA, 21 nt, synthetic construct
  source 1..21: mol_type = other RNA
  modified_base 1: mod_base = OTHER; note = 2'-fluoro adenosine phosphorothioate
  modified_base 2: mod_base = OTHER; note = 2'O-methyl cytidine phosphorothioate
  modified_base 3: mod_base = OTHER; note = 2'-fluoro cytidine
  modified_base 4: mod_base = OTHER; note = 2'O-methyl adenosine
  modified_base 5: mod_base = OTHER; note = 2'-fluoro cytidine
  modified_base 6: mod_base = OTHER; note = 2'O-methyl guanosine
  modified_base 7: mod_base = OTHER; note = 2'-fluoro uridine
  modified_base 8: mod_base = OTHER; note = 2'O-methyl cytidine
  modified_base 9: mod_base = OTHER; note = 2'-fluoro guanosine
  modified_base 10: mod_base = OTHER; note = 2'O-methyl guanosine
  modified_base 11: mod_base = OTHER; note = 2'-fluoro guanosine
  modified_base 12: mod_base = OTHER; note = 2'O-methyl guanosine
  modified_base 13: mod_base = OTHER; note = 2'-fluoro cytidine
  modified_base 14: mod_base = OTHER; note = 2'O-methyl guanosine
  modified_base 15: mod_base = OTHER; note = 2'-fluoro adenosine
  modified_base 16: mod_base = OTHER; note = 2'O-methyl cytidine
  modified_base 17: mod_base = OTHER; note = 2'-fluoro cytidine
  modified_base 18: mod_base = OTHER; note = 2'O-methyl cytidine
  modified_base 19: mod_base = OTHER; note = 2'-fluoro guanosine phosphorothioate
  modified_base 20: mod_base = OTHER; note = 2'O-methyl uridine phosphorothioate
  modified_base 21: mod_base = OTHER; note = 2'O-methyl uridine
accacgtcggggcgacccgtt

SEQ ID NO: 934 - RNA, 21 nt, synthetic construct
  source 1..21: mol_type = other RNA
  modified_base 1: mod_base = OTHER; note = 2'-fluoro cytidine phosphorothioate
  modified_base 2: mod_base = OTHER; note = 2'O-methyl uridine phosphorothioate
  modified_base 3: mod_base = OTHER; note = 2'-fluoro guanosine
  modified_base 4: mod_base = OTHER; note = 2'O-methyl cytidine
  modified_base 5: mod_base = OTHER; note = 2'-fluoro cytidine
  modified_base 6: mod_base = OTHER; note = 2'O-methyl uridine
  modified_base 7: mod_base = OTHER; note = 2'-fluoro guanosine
  modified_base 8: mod_base = OTHER; note = 2'O-methyl adenosine
  modified_base 9: mod_base = OTHER; note = 2'-fluoro guanosine
  modified_base 10: mod_base = OTHER; note = 2'O-methyl cytidine
  modified_base 11: mod_base = OTHER; note = 2'-fluoro guanosine
  modified_base 12: mod_base = OTHER; note = 2'O-methyl adenosine
  modified_base 13: mod_base = OTHER; note = 2'-fluoro guanosine
  modified_base 14: mod_base = OTHER; note = 2'O-methyl cytidine
  modified_base 15: mod_base = OTHER; note = 2'-fluoro adenosine
  modified_base 16: mod_base = OTHER; note = 2'O-methyl cytidine
  modified_base 17: mod_base = OTHER; note = 2'-fluoro guanosine
  modified_base 18: mod_base = OTHER; note = 2'O-methyl cytidine
  modified_base 19: mod_base = OTHER; note = 2'-fluoro cytidine phosphorothioate
  modified_base 20: mod_base = OTHER; note = 2'O-methyl uridine phosphorothioate
  modified_base 21: mod_base = OTHER; note = 2'O-methyl uridine
ctgcctgagcgagcacgcctt

SEQ ID NO: 935 - RNA, 21 nt, synthetic construct
  source 1..21: mol_type = other RNA
  modified_base 1: mod_base = OTHER; note = 2'-fluoro uridine phosphorothioate
  modified_base 2: mod_base = OTHER; note = 2'O-methyl guanosine phosphorothioate
  modified_base 3: mod_base = OTHER; note = 2'-fluoro cytidine
  modified_base 4: mod_base = OTHER; note = 2'O-methyl cytidine
  modified_base 5: mod_base = OTHER; note = 2'-fluoro uridine
  modified_base 6: mod_base = OTHER; note = 2'O-methyl guanosine
  modified_base 7: mod_base = OTHER; note = 2'-fluoro adenosine
  modified_base 8: mod_base = OTHER; note = 2'O-methyl guanosine
  modified_base 9: mod_base = OTHER; note = 2'-fluoro cytidine
  modified_base 10: mod_base = OTHER; note = 2'O-methyl guanosine
  modified_base 11: mod_base = OTHER; note = 2'-fluoro adenosine
  modified_base 12: mod_base = OTHER; note = 2'O-methyl guanosine
  modified_base 13: mod_base = OTHER; note = 2'-fluoro cytidine
  modified_base 14: mod_base = OTHER; note = 2'O-methyl adenosine
  modified_base 15: mod_base = OTHER; note = 2'-fluoro cytidine
  modified_base 16: mod_base = OTHER; note = 2'O-methyl guanosine
  modified_base 17: mod_base = OTHER; note = 2'-fluoro cytidine
  modified_base 18: mod_base = OTHER; note = 2'O-methyl cytidine
  modified_base 19: mod_base = OTHER; note = 2'-fluoro cytidine phosphorothioate
  modified_base 20: mod_base = OTHER; note = 2'O-methyl uridine phosphorothioate
  modified_base 21: mod_base = OTHER; note = 2'O-methyl uridine
tgcctgagcgagcacgccctt

SEQ ID NO: 936 - RNA, 21 nt, synthetic construct
  source 1..21: mol_type = other RNA
  modified_base 1: mod_base = OTHER; note = 2'-fluoro cytidine phosphorothioate
  modified_base 2: mod_base = OTHER; note = 2'O-methyl cytidine phosphorothioate
  modified_base 3: mod_base = OTHER; note = 2'-fluoro uridine
  modified_base 4: mod_base = OTHER; note = 2'O-methyl guanosine
  modified_base 5: mod_base = OTHER; note = 2'-fluoro adenosine
  modified_base 6: mod_base = OTHER; note = 2'O-methyl guanosine
  modified_base 7: mod_base = OTHER; note = 2'-fluoro cytidine
  modified_base 8: mod_base = OTHER; note = 2'O-methyl guanosine
  modified_base 9: mod_base = OTHER; note = 2'-fluoro adenosine
  modified_base 10: mod_base = OTHER; note = 2'O-methyl guanosine
  modified_base 11: mod_base = OTHER; note = 2'-fluoro cytidine
  modified_base 12: mod_base = OTHER; note = 2'O-methyl adenosine
  modified_base 13: mod_base = OTHER; note = 2'-fluoro cytidine
  modified_base 14: mod_base = OTHER; note = 2'O-methyl guanosine
  modified_base 15: mod_base = OTHER; note = 2'-fluoro cytidine
  modified_base 16: mod_base = OTHER; note = 2'O-methyl cytidine
  modified_base 17: mod_base = OTHER; note = 2'-fluoro cytidine
  modified_base 18: mod_base = OTHER; note = 2'O-methyl cytidine
  modified_base 19: mod_base = OTHER; note = 2'-fluoro guanosine phosphorothioate
  modified_base 20: mod_base = OTHER; note = 2'O-methyl uridine phosphorothioate
  modified_base 21: mod_base = OTHER; note = 2'O-methyl uridine
cctgagcgagcacgccccgtt

SEQ ID NO: 937 - RNA, 21 nt, synthetic construct
  source 1..21: mol_type = other RNA
  modified_base 1: mod_base = OTHER; note = 2'-fluoro guanosine phosphorothioate
  modified_base 2: mod_base = OTHER; note = 2'O-methyl adenosine phosphorothioate
  modified_base 3: mod_base = OTHER; note = 2'-fluoro guanosine
  modified_base 4: mod_base = OTHER; note = 2'O-methyl cytidine
  modified_base 5: mod_base = OTHER; note = 2'-fluoro guanosine
  modified_base 6: mod_base = OTHER; note = 2'O-methyl adenosine
  modified_base 7: mod_base = OTHER; note = 2'-fluoro guanosine
  modified_base 8: mod_base = OTHER; note = 2'O-methyl cytidine
  modified_base 9: mod_base = OTHER; note = 2'-fluoro adenosine
  modified_base 10: mod_base = OTHER; note = 2'O-methyl cytidine
  modified_base 11: mod_base = OTHER; note = 2'-fluoro guanosine
  modified_base 12: mod_base = OTHER; note = 2'O-methyl cytidine
  modified_base 13: mod_base = OTHER; note = 2'-fluoro cytidine
  modified_base 14: mod_base = OTHER; note = 2'O-methyl cytidine
  modified_base 15: mod_base = OTHER; note = 2'-fluoro cytidine
  modified_base 16: mod_base = OTHER; note = 2'O-methyl guanosine
  modified_base 17: mod_base = OTHER; note = 2'-fluoro cytidine
  modified_base 18: mod_base = OTHER; note = 2'O-methyl adenosine
  modified_base 19: mod_base = OTHER; note = 2'-fluoro cytidine phosphorothioate
  modified_base 20: mod_base = OTHER; note = 2'O-methyl uridine phosphorothioate
  modified_base 21: mod_base = OTHER; note = 2'O-methyl uridine
gagcgagcacgccccgcactt

SEQ ID NO: 938 - RNA, 21 nt, synthetic construct
  source 1..21: mol_type = other RNA
  modified_base 1: mod_base = OTHER; note = 2'-fluoro adenosine phosphorothioate
  modified_base 2: mod_base = OTHER; note = 2'O-methyl guanosine phosphorothioate
  modified_base 3: mod_base = OTHER; note = 2'-fluoro cytidine
  modified_base 4: mod_base = OTHER; note = 2'O-methyl guanosine
  modified_base 5: mod_base = OTHER; note = 2'-fluoro adenosine
  modified_base 6: mod_base = OTHER; note = 2'O-methyl guanosine
  modified_base 7: mod_base = OTHER; note = 2'-fluoro cytidine
  modified_base 8: mod_base = OTHER; note = 2'O-methyl adenosine
  modified_base 9: mod_base = OTHER; note = 2'-fluoro cytidine
  modified_base 10: mod_base = OTHER; note = 2'O-methyl guanosine
  modified_base 11: mod_base = OTHER; note = 2'-fluoro cytidine
  modified_base 12: mod_base = OTHER; note = 2'O-methyl cytidine
  modified_base 13: mod_base = OTHER; note = 2'-fluoro cytidine
  modified_base 14: mod_base = OTHER; note = 2'O-methyl cytidine
  modified_base 15: mod_base = OTHER; note = 2'-fluoro guanosine
  modified_base 16: mod_base = OTHER; note = 2'O-methyl cytidine
  modified_base 17: mod_base = OTHER; note = 2'-fluoro adenosine
  modified_base 18: mod_base = OTHER; note = 2'O-methyl cytidine
  modified_base 19: mod_base = OTHER; note = 2'-fluoro cytidine phosphorothioate
  modified_base 20: mod_base = OTHER; note = 2'O-methyl uridine phosphorothioate
  modified_base 21: mod_base = OTHER; note = 2'O-methyl uridine
agcgagcacgccccgcacctt

SEQ ID NO: 939 - RNA, 21 nt, synthetic construct
  source 1..21: mol_type = other RNA
  modified_base 1: mod_base = OTHER; note = 2'-fluoro guanosine phosphorothioate
  modified_base 2: mod_base = OTHER; note = 2'O-methyl adenosine phosphorothioate
  modified_base 3: mod_base = OTHER; note = 2'-fluoro guanosine
  modified_base 4: mod_base = OTHER; note = 2'O-methyl cytidine
  modified_base 5: mod_base = OTHER; note = 2'-fluoro adenosine
  modified_base 6: mod_base = OTHER; note = 2'O-methyl cytidine
  modified_base 7: mod_base = OTHER; note = 2'-fluoro guanosine
  modified_base 8: mod_base = OTHER; note = 2'O-methyl cytidine
  modified_base 9: mod_base = OTHER; note = 2'-fluoro cytidine
  modified_base 10: mod_base = OTHER; note = 2'O-methyl cytidine
  modified_base 11: mod_base = OTHER; note = 2'-fluoro cytidine
  modified_base 12: mod_base = OTHER; note = 2'O-methyl guanosine
  modified_base 13: mod_base = OTHER; note = 2'-fluoro cytidine
  modified_base 14: mod_base = OTHER; note = 2'O-methyl adenosine
  modified_base 15: mod_base = OTHER; note = 2'-fluoro cytidine
  modified_base 16: mod_base = OTHER; note = 2'O-methyl cytidine
  modified_base 17: mod_base = OTHER; note = 2'-fluoro uridine
  modified_base 18: mod_base = OTHER; note = 2'O-methyl cytidine
  modified_base 19: mod_base = OTHER; note = 2'-fluoro cytidine phosphorothioate
  modified_base 20: mod_base = OTHER; note = 2'O-methyl uridine phosphorothioate
  modified_base 21: mod_base = OTHER; note = 2'O-methyl uridine
gagcacgccccgcacctcctt

SEQ ID NO: 940 - RNA, 21 nt, synthetic construct
  source 1..21: mol_type = other RNA
  modified_base 1: mod_base = OTHER; note = 2'-fluoro cytidine phosphorothioate
  modified_base 2: mod_base = OTHER; note = 2'O-methyl cytidine phosphorothioate
  modified_base 3: mod_base = OTHER; note = 2'-fluoro cytidine
  modified_base 4: mod_base = OTHER; note = 2'O-methyl cytidine
  modified_base 5: mod_base = OTHER; note = 2'-fluoro guanosine
  modified_base 6: mod_base = OTHER; note = 2'O-methyl cytidine
  modified_base 7: mod_base = OTHER; note = 2'-fluoro adenosine
  modified_base 8: mod_base = OTHER; note = 2'O-methyl cytidine
  modified_base 9: mod_base = OTHER; note = 2'-fluoro cytidine
  modified_base 10: mod_base = OTHER; note = 2'O-methyl uridine
  modified_base 11: mod_base = OTHER; note = 2'-fluoro cytidine
  modified_base 12: mod_base = OTHER; note = 2'O-methyl cytidine
  modified_base 13: mod_base = OTHER; note = 2'-fluoro uridine
  modified_base 14: mod_base = OTHER; note = 2'O-methyl cytidine
  modified_base 15: mod_base = OTHER; note = 2'-fluoro cytidine
  modified_base 16: mod_base = OTHER; note = 2'O-methyl guanosine
  modified_base 17: mod_base = OTHER; note = 2'-fluoro cytidine
  modified_base 18: mod_base = OTHER; note = 2'O-methyl guanosine
  modified_base 19: mod_base = OTHER; note = 2'-fluoro adenosine phosphorothioate
  modified_base 20: mod_base = OTHER; note = 2'O-methyl uridine phosphorothioate
  modified_base 21: mod_base = OTHER; note = 2'O-methyl uridine
ccccgcacctcctccgcgatt

SEQ ID NO: 941 - RNA, 21 nt, synthetic construct
  source 1..21: mol_type = other RNA
  modified_base 1: mod_base = OTHER; note = 2'-fluoro cytidine phosphorothioate
  modified_base 2: mod_base = OTHER; note = 2'O-methyl cytidine phosphorothioate
  modified_base 3: mod_base = OTHER; note = 2'-fluoro cytidine
  modified_base 4: mod_base = OTHER; note = 2'O-methyl guanosine
  modified_base 5: mod_base = OTHER; note = 2'-fluoro cytidine
  modified_base 6: mod_base = OTHER; note = 2'O-methyl adenosine
  modified_base 7: mod_base = OTHER; note = 2'-fluoro cytidine
  modified_base 8: mod_base = OTHER; note = 2'O-methyl cytidine
  modified_base 9: mod_base = OTHER; note = 2'-fluoro uridine
  modified_base 10: mod_base = OTHER; note = 2'O-methyl cytidine
  modified_base 11: mod_base = OTHER; note = 2'-fluoro cytidine
  modified_base 12: mod_base = OTHER; note = 2'O-methyl uridine
  modified_base 13: mod_base = OTHER; note = 2'-fluoro cytidine
  modified_base 14: mod_base = OTHER; note = 2'O-methyl cytidine
  modified_base 15: mod_base = OTHER; note = 2'-fluoro guanosine
  modified_base 16: mod_base = OTHER; note = 2'O-methyl cytidine
  modified_base 17: mod_base = OTHER; note = 2'-fluoro guanosine
  modified_base 18: mod_base = OTHER; note = 2'O-methyl adenosine
  modified_base 19: mod_base = OTHER; note = 2'-fluoro cytidine phosphorothioate
  modified_base 20: mod_base = OTHER; note = 2'O-methyl uridine phosphorothioate
  modified_base 21: mod_base = OTHER; note = 2'O-methyl uridine
cccgcacctcctccgcgactt

SEQ ID NO: 942 - RNA, 21 nt, synthetic construct
  source 1..21: mol_type = other RNA
  modified_base 1: mod_base = OTHER; note = 2'-fluoro cytidine phosphorothioate
  modified_base 2: mod_base = OTHER; note = 2'O-methyl cytidine phosphorothioate
  modified_base 3: mod_base = OTHER; note = 2'-fluoro guanosine
  modified_base 4: mod_base = OTHER; note = 2'O-methyl cytidine
  modified_base 5: mod_base = OTHER; note = 2'-fluoro adenosine
  modified_base 6: mod_base = OTHER; note = 2'O-methyl cytidine
  modified_base 7: mod_base = OTHER; note = 2'-fluoro cytidine
  modified_base 8: mod_base = OTHER; note = 2'O-methyl uridine
  modified_base 9: mod_base = OTHER; note = 2'-fluoro cytidine
  modified_base 10: mod_base = OTHER; note = 2'O-methyl cytidine
  modified_base 11: mod_base = OTHER; note = 2'-fluoro uridine
  modified_base 12: mod_base = OTHER; note = 2'O-methyl cytidine
  modified_base 13: mod_base = OTHER; note = 2'-fluoro cytidine
  modified_base 14: mod_base = OTHER; note = 2'O-methyl guanosine
  modified_base 15: mod_base = OTHER; note = 2'-fluoro cytidine
  modified_base 16: mod_base = OTHER; note = 2'O-methyl guanosine
  modified_base 17: mod_base = OTHER; note = 2'-fluoro adenosine
  modified_base 18: mod_base = OTHER; note = 2'O-methyl cytidine
  modified_base 19: mod_base = OTHER; note = 2'-fluoro guanosine phosphorothioate
  modified_base 20: mod_base = OTHER; note = 2'O-methyl uridine phosphorothioate
  modified_base 21: mod_base = OTHER; note = 2'O-methyl uridine
ccgcacctcctccgcgacgtt

SEQ ID NO: 943 - RNA, 21 nt, synthetic construct
  source 1..21: mol_type = other RNA
  modified_base 1: mod_base = OTHER; note = 2'-fluoro cytidine phosphorothioate
  modified_base 2: mod_base = OTHER; note = 2'O-methyl guanosine phosphorothioate
  modified_base 3: mod_base = OTHER; note = 2'-fluoro cytidine
  modified_base 4: mod_base = OTHER; note = 2'O-methyl adenosine
  modified_base 5: mod_base = OTHER; note = 2'-fluoro cytidine
  modified_base 6: mod_base = OTHER; note = 2'O-methyl cytidine
  modified_base 7: mod_base = OTHER; note = 2'-fluoro uridine
  modified_base 8: mod_base = OTHER; note = 2'O-methyl cytidine
  modified_base 9: mod_base = OTHER; note = 2'-fluoro cytidine
  modified_base 10: mod_base = OTHER; note = 2'O-methyl uridine
  modified_base 11: mod_base = OTHER; note = 2'-fluoro cytidine
  modified_base 12: mod_base = OTHER; note = 2'O-methyl cytidine
  modified_base 13: mod_base = OTHER; note = 2'-fluoro guanosine
  modified_base 14: mod_base = OTHER; note = 2'O-methyl cytidine
  modified_base 15: mod_base = OTHER; note = 2'-fluoro guanosine
  modified_base 16: mod_base = OTHER; note = 2'O-methyl adenosine
  modified_base 17: mod_base = OTHER; note = 2'-fluoro cytidine
  modified_base 18: mod_base = OTHER; note = 2'O-methyl guanosine
  modified_base 19: mod_base = OTHER; note = 2'-fluoro cytidine phosphorothioate
  modified_base 20: mod_base = OTHER; note = 2'O-methyl uridine phosphorothioate
  modified_base 21: mod_base = OTHER; note = 2'O-methyl uridine
cgcacctcctccgcgacgctt

SEQ ID NO: 944 - RNA, 21 nt, synthetic construct
  source 1..21: mol_type = other RNA
  modified_base 1: mod_base = OTHER; note = 2'-fluoro cytidine phosphorothioate
  modified_base 2: mod_base = OTHER; note = 2'O-methyl cytidine phosphorothioate
  modified_base 3: mod_base = OTHER; note = 2'-fluoro uridine
  modified_base 4: mod_base = OTHER; note = 2'O-methyl cytidine
  modified_base 5: mod_base = OTHER; note = 2'-fluoro cytidine
  modified_base 6: mod_base = OTHER; note = 2'O-methyl uridine
  modified_base 7: mod_base = OTHER; note = 2'-fluoro cytidine
  modified_base 8: mod_base = OTHER; note = 2'O-methyl cytidine
  modified_base 9: mod_base = OTHER; note = 2'-fluoro guanosine
  modified_base 10: mod_base = OTHER; note = 2'O-methyl cytidine
  modified_base 11: mod_base = OTHER; note = 2'-fluoro guanosine
  modified_base 12: mod_base = OTHER; note = 2'O-methyl adenosine
  modified_base 13: mod_base = OTHER; note = 2'-fluoro cytidine
  modified_base 14: mod_base = OTHER; note = 2'O-methyl guanosine
  modified_base 15: mod_base = OTHER; note = 2'-fluoro cytidine
  modified_base 16: mod_base = OTHER; note = 2'O-methyl guanosine
  modified_base 17: mod_base = OTHER; note = 2'-fluoro cytidine
  modified_base 18: mod_base = OTHER; note = 2'O-methyl guanosine
  modified_base 19: mod_base = OTHER; note = 2'-fluoro cytidine phosphorothioate
  modified_base 20: mod_base = OTHER; note = 2'O-methyl uridine phosphorothioate
  modified_base 21: mod_base = OTHER; note = 2'O-methyl uridine
cctcctccgcgacgcgcgctt

SEQ ID NO: 945 - RNA, 21 nt, synthetic construct
  source 1..21: mol_type = other RNA
  modified_base 1: mod_base = OTHER; note = 2'-fluoro cytidine phosphorothioate
  modified_base 2: mod_base = OTHER; note = 2'O-methyl uridine phosphorothioate
  modified_base 3: mod_base = OTHER; note = 2'-fluoro cytidine
  modified_base 4: mod_base = OTHER; note = 2'O-methyl cytidine
  modified_base 5: mod_base = OTHER; note = 2'-fluoro uridine
  modified_base 6: mod_base = OTHER; note = 2'O-methyl cytidine
  modified_base 7: mod_base = OTHER; note = 2'-fluoro cytidine
  modified_base 8: mod_base = OTHER; note = 2'O-methyl guanosine
  modified_base 9: mod_base = OTHER; note = 2'-fluoro cytidine
  modified_base 10: mod_base = OTHER; note = 2'O-methyl guanosine
  modified_base 11: mod_base = OTHER; note = 2'-fluoro adenosine
  modified_base 12: mod_base = OTHER; note = 2'O-methyl cytidine
  modified_base 13: mod_base = OTHER; note = 2'-fluoro guanosine
  modified_base 14: mod_base = OTHER; note = 2'O-methyl cytidine
  modified_base 15: mod_base = OTHER; note = 2'-fluoro guanosine
  modified_base 16: mod_base = OTHER; note = 2'O-methyl cytidine
  modified_base 17: mod_base = OTHER; note = 2'-fluoro guanosine
  modified_base 18: mod_base = OTHER; note = 2'O-methyl cytidine
  modified_base 19: mod_base = OTHER; note = 2'-fluoro adenosine phosphorothioate
  modified_base 20: mod_base = OTHER; note = 2'O-methyl uridine phosphorothioate
  modified_base 21: mod_base = OTHER; note = 2'O-methyl uridine
ctcctccgcgacgcgcgcatt

SEQ ID NO: 946 - RNA, 21 nt, synthetic construct
  source 1..21: mol_type = other RNA
  modified_base 1: mod_base = OTHER; note = 2'-fluoro uridine phosphorothioate
  modified_base 2: mod_base = OTHER; note = 2'O-methyl cytidine phosphorothioate
  modified_base 3: mod_base = OTHER; note = 2'-fluoro cytidine
  modified_base 4: mod_base = OTHER; note = 2'O-methyl uridine
  modified_base 5: mod_base = OTHER; note = 2'-fluoro cytidine
  modified_base 6: mod_base = OTHER; note = 2'O-methyl cytidine
  modified_base 7: mod_base = OTHER; note = 2'-fluoro guanosine
  modified_base 8: mod_base = OTHER; note = 2'O-methyl cytidine
  modified_base 9: mod_base = OTHER; note = 2'-fluoro guanosine
  modified_base 10: mod_base = OTHER; note = 2'O-methyl adenosine
  modified_base 11: mod_base = OTHER; note = 2'-fluoro cytidine
  modified_base 12: mod_base = OTHER; note = 2'O-methyl guanosine
  modified_base 13: mod_base = OTHER; note = 2'-fluoro cytidine
  modified_base 14: mod_base = OTHER; note = 2'O-methyl guanosine
  modified_base 15: mod_base = OTHER; note = 2'-fluoro cytidine
  modified_base 16: mod_base = OTHER; note = 2'O-methyl guanosine
  modified_base 17: mod_base = OTHER; note = 2'-fluoro cytidine
  modified_base 18: mod_base = OTHER; note = 2'O-methyl adenosine
  modified_base 19: mod_base = OTHER; note = 2'-fluoro uridine phosphorothioate
  modified_base 20: mod_base = OTHER; note = 2'O-methyl uridine phosphorothioate
  modified_base 21: mod_base = OTHER; note = 2'O-methyl uridine
tcctccgcgacgcgcgcattt

SEQ ID NO: 947 - RNA, 21 nt, synthetic construct
  source 1..21: mol_type = other RNA
  modified_base 1: mod_base = OTHER; note = 2'-fluoro cytidine phosphorothioate
  modified_base 2: mod_base = OTHER; note = 2'O-methyl cytidine phosphorothioate
  modified_base 3: mod_base = OTHER; note = 2'-fluoro uridine
  modified_base 4: mod_base = OTHER; note = 2'O-methyl cytidine
  modified_base 5: mod_base = OTHER; note = 2'-fluoro cytidine
  modified_base 6: mod_base = OTHER; note = 2'O-methyl guanosine
  modified_base 7: mod_base = OTHER; note = 2'-fluoro cytidine
  modified_base 8: mod_base = OTHER; note = 2'O-methyl guanosine
  modified_base 9: mod_base = OTHER; note = 2'-fluoro adenosine
  modified_base 10: mod_base = OTHER; note = 2'O-methyl cytidine
  modified_base 11: mod_base = OTHER; note = 2'-fluoro guanosine
  modified_base 12: mod_base = OTHER; note = 2'O-methyl cytidine
  modified_base 13: mod_base = OTHER; note = 2'-fluoro guanosine
  modified_base 14: mod_base = OTHER; note = 2'O-methyl cytidine
  modified_base 15: mod_base = OTHER; note = 2'-fluoro guanosine
  modified_base 16: mod_base = OTHER; note = 2'O-methyl cytidine
  modified_base 17: mod_base = OTHER; note = 2'-fluoro adenosine
  modified_base 18: mod_base = OTHER; note = 2'O-methyl uridine
  modified_base 19: mod_base = OTHER; note = 2'-fluoro guanosine phosphorothioate
  modified_base 20: mod_base = OTHER; note = 2'O-methyl uridine phosphorothioate
  modified_base 21: mod_base = OTHER; note = 2'O-methyl uridine
cctccgcgacgcgcgcatgtt

SEQ ID NO: 948 - RNA, 21 nt, synthetic construct
  source 1..21: mol_type = other RNA
  modified_base 1: mod_base = OTHER; note = 2'-fluoro cytidine phosphorothioate
  modified_base 2: mod_base = OTHER; note = 2'O-methyl uridine phosphorothioate
  modified_base 3: mod_base = OTHER; note = 2'-fluoro cytidine
  modified_base 4: mod_base = OTHER; note = 2'O-methyl cytidine
  modified_base 5: mod_base = OTHER; note = 2'-fluoro guanosine
  modified_base 6: mod_base = OTHER; note = 2'O-methyl cytidine
  modified_base 7: mod_base = OTHER; note = 2'-fluoro guanosine
  modified_base 8: mod_base = OTHER; note = 2'O-methyl adenosine
  modified_base 9: mod_base = OTHER; note = 2'-fluoro cytidine
  modified_base 10: mod_base = OTHER; note = 2'O-methyl guanosine
  modified_base 11: mod_base = OTHER; note = 2'-fluoro cytidine
  modified_base 12: mod_base = OTHER; note = 2'O-methyl guanosine
  modified_base 13: mod_base = OTHER; note = 2'-fluoro cytidine
  modified_base 14: mod_base = OTHER; note = 2'O-methyl guanosine
  modified_base 15: mod_base = OTHER; note = 2'-fluoro cytidine
  modified_base 16: mod_base = OTHER; note = 2'O-methyl adenosine
  modified_base 17: mod_base = OTHER; note = 2'-fluoro uridine
  modified_base 18: mod_base = OTHER; note = 2'O-methyl guanosine
  modified_base 19: mod_base = OTHER; note = 2'-fluoro uridine phosphorothioate
  modified_base 20: mod_base = OTHER; note = 2'O-methyl uridine phosphorothioate
  modified_base 21: mod_base = OTHER; note = 2'O-methyl uridine
ctccgcgacgcgcgcatgttt

SEQ ID NO: 949 - RNA, 21 nt, synthetic construct
  source 1..21: mol_type = other RNA
  modified_base 1: mod_base = OTHER; note = 2'-fluoro uridine phosphorothioate
  modified_base 2: mod_base = OTHER; note = 2'O-methyl cytidine phosphorothioate
  modified_base 3: mod_base = OTHER; note = 2'-fluoro cytidine
  modified_base 4: mod_base = OTHER; note = 2'O-methyl guanosine
  modified_base 5: mod_base = OTHER; note = 2'-fluoro cytidine
  modified_base 6: mod_base = OTHER; note = 2'O-methyl guanosine
  modified_base 7: mod_base = OTHER; note = 2'-fluoro adenosine
  modified_base 8: mod_base = OTHER; note = 2'O-methyl cytidine
  modified_base 9: mod_base = OTHER; note = 2'-fluoro guanosine
  modified_base 10: mod_base = OTHER; note = 2'O-methyl cytidine
  modified_base 11: mod_base = OTHER; note = 2'-fluoro guanosine
  modified_base 12: mod_base = OTHER; note = 2'O-methyl cytidine
  modified_base 13: mod_base = OTHER; note = 2'-fluoro guanosine
  modified_base 14: mod_base = OTHER; note = 2'O-methyl cytidine
  modified_base 15: mod_base = OTHER; note = 2'-fluoro adenosine
  modified_base 16: mod_base = OTHER; note = 2'O-methyl uridine
  modified_base 17: mod_base = OTHER; note = 2'-fluoro guanosine
  modified_base 18: mod_base = OTHER; note = 2'O-methyl uridine
  modified_base 19: mod_base = OTHER; note = 2'-fluoro uridine phosphorothioate
  modified_base 20: mod_base = OTHER; note = 2'O-methyl uridine phosphorothioate
  modified_base 21: mod_base = OTHER; note = 2'O-methyl uridine
tccgcgacgcgcgcatgtttt

SEQ ID NO: 950 - RNA, 21 nt, synthetic construct
  source 1..21: mol_type = other RNA
  modified_base 1: mod_base = OTHER; note = 2'-fluoro cytidine phosphorothioate
  modified_base 2: mod_base = OTHER; note = 2'O-methyl cytidine phosphorothioate
  modified_base 3: mod_base = OTHER; note = 2'-fluoro guanosine
  modified_base 4: mod_base = OTHER; note = 2'O-methyl cytidine
  modified_base 5: mod_base = OTHER; note = 2'-fluoro guanosine
  modified_base 6: mod_base = OTHER; note = 2'O-methyl adenosine
  modified_base 7: mod_base = OTHER; note = 2'-fluoro cytidine
  modified_base 8: mod_base = OTHER; note = 2'O-methyl guanosine
  modified_base 9: mod_base = OTHER; note = 2'-fluoro cytidine
  modified_base 10: mod_base = OTHER; note = 2'O-methyl guanosine
  modified_base 11: mod_base = OTHER; note = 2'-fluoro cytidine
  modified_base 12: mod_base = OTHER; note = 2'O-methyl guanosine
  modified_base 13: mod_base = OTHER; note = 2'-fluoro cytidine
  modified_base 14: mod_base = OTHER; note = 2'O-methyl adenosine
  modified_base 15: mod_base = OTHER; note = 2'-fluoro uridine
  modified_base 16: mod_base = OTHER; note = 2'O-methyl guanosine
  modified_base 17: mod_base = OTHER; note = 2'-fluoro uridine
  modified_base 18: mod_base = OTHER; note = 2'O-methyl uridine
  modified_base 19: mod_base = OTHER; note = 2'-fluoro guanosine phosphorothioate
  modified_base 20: mod_base = OTHER; note = 2'O-methyl uridine phosphorothioate
  modified_base 21: mod_base = OTHER; note = 2'O-methyl uridine
ccgcgacgcgcgcatgttgtt

SEQ ID NO: 951 - RNA, 21 nt, synthetic construct
  source 1..21: mol_type = other RNA
  modified_base 1: mod_base = OTHER; note = 2'-fluoro cytidine phosphorothioate
  modified_base 2: mod_base = OTHER; note = 2'O-methyl guanosine phosphorothioate
  modified_base 3: mod_base = OTHER; note = 2'-fluoro cytidine
  modified_base 4: mod_base = OTHER; note = 2'O-methyl guanosine
  modified_base 5: mod_base = OTHER; note = 2'-fluoro adenosine
  modified_base 6: mod_base = OTHER; note = 2'O-methyl cytidine
  modified_base 7: mod_base = OTHER; note = 2'-fluoro guanosine
  modified_base 8: mod_base = OTHER; note = 2'O-methyl cytidine
  modified_base 9: mod_base = OTHER; note = 2'-fluoro guanosine
  modified_base 10: mod_base = OTHER; note = 2'O-methyl cytidine
  modified_base 11: mod_base = OTHER; note = 2'-fluoro guanosine
  modified_base 12: mod_base = OTHER; note = 2'O-methyl cytidine
  modified_base 13: mod_base = OTHER; note = 2'-fluoro adenosine
  modified_base 14: mod_base = OTHER; note = 2'O-methyl uridine
  modified_base 15: mod_base = OTHER; note = 2'-fluoro guanosine
  modified_base 16: mod_base = OTHER; note = 2'O-methyl uridine
  modified_base 17: mod_base = OTHER; note = 2'-fluoro uridine
  modified_base 18: mod_base = OTHER; note = 2'O-methyl guanosine
  modified_base 19: mod_base = OTHER; note = 2'-fluoro uridine phosphorothioate
  modified_base 20: mod_base = OTHER; note = 2'O-methyl uridine phosphorothioate
  modified_base 21: mod_base = OTHER; note = 2'O-methyl uridine
cgcgacgcgcgcatgttgttt

SEQ ID NO: 952 - RNA, 21 nt, synthetic construct
  source 1..21: mol_type = other RNA
  modified_base 1: mod_base = OTHER; note = 2'-fluoro guanosine phosphorothioate
  modified_base 2: mod_base = OTHER; note = 2'O-methyl cytidine phosphorothioate
  modified_base 3: mod_base = OTHER; note = 2'-fluoro guanosine
  modified_base 4: mod_base = OTHER; note = 2'O-methyl adenosine
  modified_base 5: mod_base = OTHER; note = 2'-fluoro cytidine
  modified_base 6: mod_base = OTHER; note = 2'O-methyl guanosine
  modified_base 7: mod_base = OTHER; note = 2'-fluoro cytidine
  modified_base 8: mod_base = OTHER; note = 2'O-methyl guanosine
  modified_base 9: mod_base = OTHER; note = 2'-fluoro cytidine
  modified_base 10: mod_base = OTHER; note = 2'O-methyl guanosine
  modified_base 11: mod_base = OTHER; note = 2'-fluoro cytidine
  modified_base 12: mod_base = OTHER; note = 2'O-methyl adenosine
  modified_base 13: mod_base = OTHER; note = 2'-fluoro uridine
  modified_base 14: mod_base = OTHER; note = 2'O-methyl guanosine
  modified_base 15: mod_base = OTHER; note = 2'-fluoro uridine
  modified_base 16: mod_base = OTHER; note = 2'O-methyl uridine
  modified_base 17: mod_base = OTHER; note = 2'-fluoro guanosine
  modified_base 18: mod_base = OTHER; note = 2'O-methyl uridine
  modified_base 19: mod_base = OTHER; note = 2'-fluoro uridine phosphorothioate
  modified_base 20: mod_base = OTHER; note = 2'O-methyl uridine phosphorothioate
  modified_base 21: mod_base = OTHER; note = 2'O-methyl uridine
gcgacgcgcgcatgttgtttt

SEQ ID NO: 953 - RNA, 21 nt, synthetic construct
  source 1..21: mol_type = other RNA
  modified_base 1: mod_base = OTHER; note = 2'-fluoro guanosine phosphorothioate
  modified_base 2: mod_base = OTHER; note = 2'O-methyl adenosine phosphorothioate
  modified_base 3: mod_base = OTHER; note = 2'-fluoro cytidine
  modified_base 4: mod_base = OTHER; note = 2'O-methyl guanosine
  modified_base 5: mod_base = OTHER; note = 2'-fluoro cytidine
  modified_base 6: mod_base = OTHER; note = 2'O-methyl guanosine
  modified_base 7: mod_base = OTHER; note = 2'-fluoro cytidine
  modified_base 8: mod_base = OTHER; note = 2'O-methyl guanosine
  modified_base 9: mod_base = OTHER; note = 2'-fluoro cytidine
  modified_base 10: mod_base = OTHER; note = 2'O-methyl adenosine
  modified_base 11: mod_base = OTHER; note = 2'-fluoro uridine
  modified_base 12: mod_base = OTHER; note = 2'O-methyl guanosine
  modified_base 13: mod_base = OTHER; note = 2'-fluoro uridine
  modified_base 14: mod_base = OTHER; note = 2'O-methyl uridine
  modified_base 15: mod_base = OTHER; note = 2'-fluoro guanosine
  modified_base 16: mod_base = OTHER; note = 2'O-methyl uridine
  modified_base 17: mod_base = OTHER; note = 2'-fluoro uridine
  modified_base 18: mod_base = OTHER; note = 2'O-methyl cytidine
  modified_base 19: mod_base = OTHER; note = 2'-fluoro guanosine phosphorothioate
  modified_base 20: mod_base = OTHER; note = 2'O-methyl uridine phosphorothioate
  modified_base 21: mod_base = OTHER; note = 2'O-methyl uridine
gacgcgcgcatgttgttcgtt

SEQ ID NO: 954 - RNA, 21 nt, synthetic construct
  source 1..21: mol_type = other RNA
  modified_base 1: mod_base = OTHER; note = 2'-fluoro adenosine phosphorothioate
  modified_base 2: mod_base = OTHER; note = 2'O-methyl cytidine phosphorothioate
  modified_base 3: mod_base = OTHER; note = 2'-fluoro guanosine
  modified_base 4: mod_base = OTHER; note = 2'O-methyl cytidine
  modified_base 5: mod_base = OTHER; note = 2'-fluoro guanosine
  modified_base 6: mod_base = OTHER; note = 2'O-methyl cytidine
  modified_base 7: mod_base = OTHER; note = 2'-fluoro guanosine
  modified_base 8: mod_base = OTHER; note = 2'O-methyl cytidine
  modified_base 9: mod_base = OTHER; note = 2'-fluoro adenosine
  modified_base 10: mod_base = OTHER; note = 2'O-methyl uridine
  modified_base 11: mod_base = OTHER; note = 2'-fluoro guanosine
  modified_base 12: mod_base = OTHER; note = 2'O-methyl uridine
  modified_base 13: mod_base = OTHER; note = 2'-fluoro uridine
  modified_base 14: mod_base = OTHER; note = 2'O-methyl guanosine
  modified_base 15: mod_base = OTHER; note = 2'-fluoro uridine
  modified_base 16: mod_base = OTHER; note = 2'O-methyl uridine
  modified_base 17: mod_base = OTHER; note = 2'-fluoro cytidine
  modified_base 18: mod_base = OTHER; note = 2'O-methyl guanosine
  modified_base 19: mod_base = OTHER; note = 2'-fluoro guanosine phosphorothioate
  modified_base 20: mod_base = OTHER; note = 2'O-methyl uridine phosphorothioate
  modified_base 21: mod_base = OTHER; note = 2'O-methyl uridine
acgcgcgcatgttgttcggtt

SEQ ID NO: 955 - RNA, 21 nt, synthetic construct
  source 1..21: mol_type = other RNA
  modified_base 1: mod_base = OTHER; note = 2'-fluoro cytidine phosphorothioate
  modified_base 2: mod_base = OTHER; note = 2'O-methyl guanosine phosphorothioate
  modified_base 3: mod_base = OTHER; note = 2'-fluoro cytidine
  modified_base 4: mod_base = OTHER; note = 2'O-methyl guanosine
  modified_base 5: mod_base = OTHER; note = 2'-fluoro cytidine
  modified_base 6: mod_base = OTHER; note = 2'O-methyl guanosine
  modified_base 7: mod_base = OTHER; note = 2'-fluoro cytidine
  modified_base 8: mod_base = OTHER; note = 2'O-methyl adenosine
  modified_base 9: mod_base = OTHER; note = 2'-fluoro uridine
  modified_base 10: mod_base = OTHER; note = 2'O-methyl guanosine
  modified_base 11: mod_base = OTHER; note = 2'-fluoro uridine
  modified_base 12: mod_base = OTHER; note = 2'O-methyl uridine
  modified_base 13: mod_base = OTHER; note = 2'-fluoro guanosine
  modified_base 14: mod_base = OTHER; note = 2'O-methyl uridine
  modified_base 15: mod_base = OTHER; note = 2'-fluoro uridine
  modified_base 16: mod_base = OTHER; note = 2'O-methyl cytidine
  modified_base 17: mod_base = OTHER; note = 2'-fluoro guanosine
  modified_base 18: mod_base = OTHER; note = 2'O-methyl guanosine
  modified_base 19: mod_base = OTHER; note = 2'-fluoro cytidine phosphorothioate
  modified_base 20: mod_base = OTHER; note = 2'O-methyl uridine phosphorothioate
  modified_base 21: mod_base = OTHER; note = 2'O-methyl uridine
cgcgcgcatgttgttcggctt

SEQ ID NO: 956 - RNA, 21 nt, synthetic construct
  source 1..21: mol_type = other RNA
  modified_base 1: mod_base = OTHER; note = 2'-fluoro guanosine phosphorothioate
  modified_base 2: mod_base = OTHER; note = 2'O-methyl cytidine phosphorothioate
  modified_base 3: mod_base = OTHER; note = 2'-fluoro guanosine
  modified_base 4: mod_base = OTHER; note = 2'O-methyl cytidine
  modified_base 5: mod_base = OTHER; note = 2'-fluoro guanosine
  modified_base 6: mod_base = OTHER; note = 2'O-methyl cytidine
  modified_base 7: mod_base = OTHER; note = 2'-fluoro adenosine
  modified_base 8: mod_base = OTHER; note = 2'O-methyl uridine
  modified_base 9: mod_base = OTHER; note = 2'-fluoro guanosine
  modified_base 10: mod_base = OTHER; note = 2'O-methyl uridine
  modified_base 11: mod_base = OTHER; note = 2'-fluoro uridine
  modified_base 12: mod_base = OTHER; note = 2'O-methyl guanosine
  modified_base 13: mod_base = OTHER; note = 2'-fluoro uridine
  modified_base 14: mod_base = OTHER; note = 2'O-methyl uridine
  modified_base 15: mod_base = OTHER; note = 2'-fluoro cytidine
  modified_base 16: mod_base = OTHER; note = 2'O-methyl guanosine
  modified_base 17: mod_base = OTHER; note = 2'-fluoro guanosine
  modified_base 18: mod_base = OTHER; note = 2'O-methyl cytidine
  modified_base 19: mod_base = OTHER; note = 2'-fluoro guanosine phosphorothioate
  modified_base 20: mod_base = OTHER; note = 2'O-methyl uridine phosphorothioate
  modified_base 21: mod_base = OTHER; note = 2'O-methyl uridine
gcgcgcatgttgttcggcgtt

SEQ ID NO: 957 - RNA, 21 nt, synthetic construct
  source 1..21: mol_type = other RNA
  modified_base 1: mod_base = OTHER; note = 2'-fluoro uridine phosphorothioate
  modified_base 2: mod_base = OTHER; note = 2'O-methyl uridine phosphorothioate
  modified_base 3: mod_base = OTHER; note = 2'-fluoro guanosine
  modified_base 4: mod_base = OTHER; note = 2'O-methyl uridine
  modified_base 5: mod_base = OTHER; note = 2'-fluoro uridine
  modified_base 6: mod_base = OTHER; note = 2'O-methyl cytidine
  modified_base 7: mod_base = OTHER; note = 2'-fluoro guanosine
  modified_base 8: mod_base = OTHER; note = 2'O-methyl guanosine
  modified_base 9: mod_base = OTHER; note = 2'-fluoro cytidine
  modified_base 10: mod_base = OTHER; note = 2'O-methyl guanosine
  modified_base 11: mod_base = OTHER; note = 2'-fluoro cytidine
  modified_base 12: mod_base = OTHER; note = 2'O-methyl uridine
  modified_base 13: mod_base = OTHER; note = 2'-fluoro uridine
  modified_base 14: mod_base = OTHER; note = 2'O-methyl cytidine
  modified_base 15: mod_base = OTHER; note = 2'-fluoro guanosine
  modified_base 16: mod_base = OTHER; note = 2'O-methyl guanosine
  modified_base 17: mod_base = OTHER; note = 2'-fluoro cytidine
  modified_base 18: mod_base = OTHER; note = 2'O-methyl cytidine
  modified_base 19: mod_base = OTHER; note = 2'-fluoro guanosine phosphorothioate
  modified_base 20: mod_base = OTHER; note = 2'O-methyl uridine phosphorothioate
  modified_base 21: mod_base = OTHER; note = 2'O-methyl uridine
ttgttcggcgcttcggccgtt

SEQ ID NO: 958 - RNA, 21 nt, synthetic construct
  source 1..21: mol_type = other RNA
  modified_base 1: mod_base = OTHER; note = 2'-fluoro uridine phosphorothioate
  modified_base 2: mod_base = OTHER; note = 2'O-methyl guanosine phosphorothioate
  modified_base 3: mod_base = OTHER; note = 2'-fluoro uridine
  modified_base 4: mod_base = OTHER; note = 2'O-methyl uridine
  modified_base 5: mod_base = OTHER; note = 2'-fluoro cytidine
  modified_base 6: mod_base = OTHER; note = 2'O-methyl guanosine
  modified_base 7: mod_base = OTHER; note = 2'-fluoro guanosine
  modified_base 8: mod_base = OTHER; note = 2'O-methyl cytidine
  modified_base 9: mod_base = OTHER; note = 2'-fluoro guanosine
  modified_base 10: mod_base = OTHER; note = 2'O-methyl cytidine
  modified_base 11: mod_base = OTHER; note = 2'-fluoro uridine
  modified_base 12: mod_base = OTHER; note = 2'O-methyl uridine
  modified_base 13: mod_base = OTHER; note = 2'-fluoro cytidine
  modified_base 14: mod_base = OTHER; note = 2'O-methyl guanosine
  modified_base 15: mod_base = OTHER; note = 2'-fluoro guanosine
  modified_base 16: mod_base = OTHER; note = 2'O-methyl cytidine
  modified_base 17: mod_base = OTHER; note = 2'-fluoro cytidine
  modified_base 18: mod_base = OTHER; note = 2'O-methyl guanosine
  modified_base 19: mod_base = OTHER; note = 2'-fluoro guanosine phosphorothioate
  modified_base 20: mod_base = OTHER; note = 2'O-methyl uridine phosphorothioate
  modified_base 21: mod_base = OTHER; note = 2'O-methyl uridine
tgttcggcgcttcggccggtt

SEQ ID NO: 959 - RNA, 21 nt, synthetic construct
  source 1..21: mol_type = other RNA
  modified_base 1: mod_base = OTHER; note = 2'-fluoro uridine phosphorothioate
  modified_base 2: mod_base = OTHER; note = 2'O-methyl cytidine phosphorothioate
  modified_base 3: mod_base = OTHER; note = 2'-fluoro guanosine
  modified_base 4: mod_base = OTHER; note = 2'O-methyl guanosine
  modified_base 5: mod_base = OTHER; note = 2'-fluoro cytidine
  modified_base 6: mod_base = OTHER; note = 2'O-methyl cytidine
  modified_base 7: mod_base = OTHER; note = 2'-fluoro guanosine
  modified_base 8: mod_base = OTHER; note = 2'O-methyl guanosine
  modified_base 9: mod_base = OTHER; note = 2'-fluoro guanosine
  modified_base 10: mod_base = OTHER; note = 2'O-methyl guanosine
  modified_base 11: mod_base = OTHER; note = 2'-fluoro cytidine
  modified_base 12: mod_base = OTHER; note = 2'O-methyl guanosine
  modified_base 13: mod_base = OTHER; note = 2'-fluoro uridine
  modified_base 14: mod_base = OTHER; note = 2'O-methyl uridine
  modified_base 15: mod_base = OTHER; note = 2'-fluoro guanosine
  modified_base 16: mod_base = OTHER; note = 2'O-methyl cytidine
  modified_base 17: mod_base = OTHER; note = 2'-fluoro adenosine
  modified_base 18: mod_base = OTHER; note = 2'O-methyl cytidine
  modified_base 19: mod_base = OTHER; note = 2'-fluoro uridine phosphorothioate
  modified_base 20: mod_base = OTHER; note = 2'O-methyl uridine phosphorothioate
  modified_base 21: mod_base = OTHER; note = 2'O-methyl uridine
tcggccggggcgttgcacttt

SEQ ID NO: 960 - RNA, 21 nt, synthetic construct
  source 1..21: mol_type = other RNA
  modified_base 1: mod_base = OTHER; note = 2'-fluoro cytidine phosphorothioate
  modified_base 2: mod_base = OTHER; note = 2'O-methyl uridine phosphorothioate
  modified_base 3: mod_base = OTHER; note = 2'-fluoro uridine
  modified_base 4: mod_base = OTHER; note = 2'O-methyl guanosine
  modified_base 5: mod_base = OTHER; note = 2'-fluoro uridine
  modified_base 6: mod_base = OTHER; note = 2'O-methyl guanosine
  modified_base 7: mod_base = OTHER; note = 2'-fluoro cytidine
  modified_base 8: mod_base = OTHER; note = 2'O-methyl guanosine
  modified_base 9: mod_base = OTHER; note = 2'-fluoro guanosine
  modified_base 10: mod_base = OTHER; note = 2'O-methyl adenosine
  modified_base 11: mod_base = OTHER; note = 2'-fluoro adenosine
  modified_base 12: mod_base = OTHER; note = 2'O-methyl guanosine
  modified_base 13: mod_base = OTHER; note = 2'-fluoro guanosine
  modified_base 14: mod_base = OTHER; note = 2'O-methyl cytidine
  modified_base 15: mod_base = OTHER; note = 2'-fluoro cytidine
  modified_base 16: mod_base = OTHER; note = 2'O-methyl adenosine
  modified_base 17: mod_base = OTHER; note = 2'-fluoro guanosine
  modified_base 18: mod_base = OTHER; note = 2'O-methyl guanosine
  modified_base 19: mod_base = OTHER; note = 2'-fluoro adenosine phosphorothioate
  modified_base 20: mod_base = OTHER; note = 2'O-methyl uridine phosphorothioate
  modified_base 21: mod_base = OTHER; note = 2'O-methyl uridine
cttgtgcggaaggccaggatt

SEQ ID NO: 961 - RNA, 21 nt, synthetic construct
  source 1..21: mol_type = other RNA
  modified_base 1: mod_base = OTHER; note = 2'-fluoro uridine phosphorothioate
  modified_base 2: mod_base = OTHER; note = 2'O-methyl guanosine phosphorothioate
  modified_base 3: mod_base = OTHER; note = 2'-fluoro uridine
  modified_base 4: mod_base = OTHER; note = 2'O-methyl guanosine
  modified_base 5: mod_base = OTHER; note = 2'-fluoro cytidine
  modified_base 6: mod_base = OTHER; note = 2'O-methyl guanosine
  modified_base 7: mod_base = OTHER; note = 2'-fluoro guanosine
  modified_base 8: mod_base = OTHER; note = 2'O-methyl adenosine
  modified_base 9: mod_base = OTHER; note = 2'-fluoro adenosine
  modified_base 10: mod_base = OTHER; note = 2'O-methyl guanosine
  modified_base 11: mod_base = OTHER; note = 2'-fluoro guanosine
  modified_base 12: mod_base = OTHER; note = 2'O-methyl cytidine
  modified_base 13: mod_base = OTHER; note = 2'-fluoro cytidine
  modified_base 14: mod_base = OTHER; note = 2'O-methyl adenosine
  modified_base 15: mod_base = OTHER; note = 2'-fluoro guanosine
  modified_base 16: mod_base = OTHER; note = 2'O-methyl guanosine
  modified_base 17: mod_base = OTHER; note = 2'-fluoro adenosine
  modified_base 18: mod_base = OTHER; note = 2'O-methyl guanosine
  modified_base 19: mod_base = OTHER; note = 2'-fluoro uridine phosphorothioate
  modified_base 20: mod_base = OTHER; note = 2'O-methyl uridine phosphorothioate
  modified_base 21: mod_base = OTHER; note = 2'O-methyl uridine
tgtgcggaaggccaggagttt

SEQ ID NO: 962 - RNA, 21 nt, synthetic construct
  source 1..21: mol_type = other RNA
  modified_base 1: mod_base = OTHER; note = 2'-fluoro uridine phosphorothioate
  modified_base 2: mod_base = OTHER; note = 2'O-methyl guanosine phosphorothioate
  modified_base 3: mod_base = OTHER; note = 2'-fluoro cytidine
  modified_base 4: mod_base = OTHER; note = 2'O-methyl guanosine
  modified_base 5: mod_base = OTHER; note = 2'-fluoro guanosine
  modified_base 6: mod_base = OTHER; note = 2'O-methyl adenosine
  modified_base 7: mod_base = OTHER; note = 2'-fluoro adenosine
  modified_base 8: mod_base = OTHER; note = 2'O-methyl guanosine
  modified_base 9: mod_base = OTHER; note = 2'-fluoro guanosine
  modified_base 10: mod_base = OTHER; note = 2'O-methyl cytidine
  modified_base 11: mod_base = OTHER; note = 2'-fluoro cytidine
  modified_base 12: mod_base = OTHER; note = 2'O-methyl adenosine
  modified_base 13: mod_base = OTHER; note = 2'-fluoro guanosine
  modified_base 14: mod_base = OTHER; note = 2'O-methyl guanosine
  modified_base 15: mod_base = OTHER; note = 2'-fluoro adenosine
  modified_base 16: mod_base = OTHER; note = 2'O-methyl guanosine
  modified_base 17: mod_base = OTHER; note = 2'-fluoro uridine
  modified_base 18: mod_base = OTHER; note = 2'O-methyl cytidine
  modified_base 19: mod_base = OTHER; note = 2'-fluoro guanosine phosphorothioate
  modified_base 20: mod_base = OTHER; note = 2'O-methyl uridine phosphorothioate
  modified_base 21: mod_base = OTHER; note = 2'O-methyl uridine
tgcggaaggccaggagtcgtt

SEQ ID NO: 963 - RNA, 21 nt, synthetic construct
  source 1..21: mol_type = other RNA
  modified_base 1: mod_base = OTHER; note = 2'-fluoro cytidine phosphorothioate
  modified_base 2: mod_base = OTHER; note = 2'O-methyl guanosine phosphorothioate
  modified_base 3: mod_base = OTHER; note = 2'-fluoro guanosine
  modified_base 4: mod_base = OTHER; note = 2'O-methyl adenosine
  modified_base 5: mod_base = OTHER; note = 2'-fluoro adenosine
  modified_base 6: mod_base = OTHER; note = 2'O-methyl guanosine
  modified_base 7: mod_base = OTHER; note = 2'-fluoro guanosine
  modified_base 8: mod_base = OTHER; note = 2'O-methyl cytidine
  modified_base 9: mod_base = OTHER; note = 2'-fluoro cytidine
  modified_base 10: mod_base = OTHER; note = 2'O-methyl adenosine
  modified_base 11: mod_base = OTHER; note = 2'-fluoro guanosine
  modified_base 12: mod_base = OTHER; note = 2'O-methyl guanosine
  modified_base 13: mod_base = OTHER; note = 2'-fluoro adenosine
  modified_base 14: mod_base = OTHER; note = 2'O-methyl guanosine
  modified_base 15: mod_base = OTHER; note = 2'-fluoro uridine
  modified_base 16: mod_base = OTHER; note = 2'O-methyl cytidine
  modified_base 17: mod_base = OTHER; note = 2'-fluoro guanosine
  modified_base 18: mod_base = OTHER; note = 2'O-methyl guanosine
  modified_base 19: mod_base = OTHER; note = 2'-fluoro adenosine phosphorothioate
  modified_base 20: mod_base = OTHER; note = 2'O-methyl uridine phosphorothioate
  modified_base 21: mod_base = OTHER; note = 2'O-methyl uridine
cggaaggccaggagtcggatt

SEQ ID NO: 964 - RNA, 21 nt, synthetic construct
  source 1..21: mol_type = other RNA
  modified_base 1: mod_base = OTHER; note = 2'-fluoro adenosine phosphorothioate
  modified_base 2: mod_base = OTHER; note = 2'O-methyl adenosine phosphorothioate
  modified_base 3: mod_base = OTHER; note = 2'-fluoro guanosine
  modified_base 4: mod_base = OTHER; note = 2'O-methyl guanosine
  modified_base 5: mod_base = OTHER; note = 2'-fluoro cytidine
  modified_base 6: mod_base = OTHER; note = 2'O-methyl cytidine
  modified_base 7: mod_base = OTHER; note = 2'-fluoro adenosine
  modified_base 8: mod_base = OTHER; note = 2'O-methyl guanosine
  modified_base 9: mod_base = OTHER; note = 2'-fluoro guanosine
  modified_base 10: mod_base = OTHER; note = 2'O-methyl adenosine
  modified_base 11: mod_base = OTHER; note = 2'-fluoro guanosine
  modified_base 12: mod_base = OTHER; note = 2'O-methyl uridine
  modified_base 13: mod_base = OTHER; note = 2'-fluoro cytidine
  modified_base 14: mod_base = OTHER; note = 2'O-methyl guanosine
  modified_base 15: mod_base = OTHER; note = 2'-fluoro guanosine
  modified_base 16: mod_base = OTHER; note = 2'O-methyl adenosine
  modified_base 17: mod_base = OTHER; note = 2'-fluoro adenosine
  modified_base 18: mod_base = OTHER; note = 2'O-methyl cytidine
  modified_base 19: mod_base = OTHER; note = 2'-fluoro adenosine phosphorothioate
  modified_base 20: mod_base = OTHER; note = 2'O-methyl uridine phosphorothioate
  modified_base 21: mod_base = OTHER; note = 2'O-methyl uridine
aaggccaggagtcggaacatt

SEQ ID NO: 965 - RNA, 21 nt, synthetic construct
  source 1..21: mol_type = other RNA
  modified_base 1: mod_base = OTHER; note = 2'-fluoro adenosine phosphorothioate
  modified_base 2: mod_base = OTHER; note = 2'O-methyl guanosine phosphorothioate
  modified_base 3: mod_base = OTHER; note = 2'-fluoro guanosine
  modified_base 4: mod_base = OTHER; note = 2'O-methyl cytidine
  modified_base 5: mod_base = OTHER; note = 2'-fluoro cytidine
  modified_base 6: mod_base = OTHER; note = 2'O-methyl adenosine
  modified_base 7: mod_base = OTHER; note = 2'-fluoro guanosine
  modified_base 8: mod_base = OTHER; note = 2'O-methyl guanosine
  modified_base 9: mod_base = OTHER; note = 2'-fluoro adenosine
  modified_base 10: mod_base = OTHER; note = 2'O-methyl guanosine
  modified_base 11: mod_base = OTHER; note = 2'-fluoro uridine
  modified_base 12: mod_base = OTHER; note = 2'O-methyl cytidine
  modified_base 13: mod_base = OTHER; note = 2'-fluoro guanosine
  modified_base 14: mod_base = OTHER; note = 2'O-methyl guanosine
  modified_base 15: mod_base = OTHER; note = 2'-fluoro adenosine
  modified_base 16: mod_base = OTHER; note = 2'O-methyl adenosine
  modified_base 17: mod_base = OTHER; note = 2'-fluoro cytidine
  modified_base 18: mod_base = OTHER; note = 2'O-methyl adenosine
  modified_base 19: mod_base = OTHER; note = 2'-fluoro uridine phosphorothioate
  modified_base 20: mod_base = OTHER; note = 2'O-methyl uridine phosphorothioate
  modified_base 21: mod_base = OTHER; note = 2'O-methyl uridine
aggccaggagtcggaacattt

SEQ ID NO: 966 - RNA, 21 nt, synthetic construct
  source 1..21: mol_type = other RNA
  modified_base 1: mod_base = OTHER; note = 2'-fluoro guanosine phosphorothioate
  modified_base 2: mod_base = OTHER; note = 2'O-methyl guanosine phosphorothioate
  modified_base 3: mod_base = OTHER; note = 2'-fluoro cytidine
  modified_base 4: mod_base = OTHER; note = 2'O-methyl cytidine
  modified_base 5: mod_base = OTHER; note = 2'-fluoro adenosine
  modified_base 6: mod_base = OTHER; note = 2'O-methyl guanosine
  modified_base 7: mod_base = OTHER; note = 2'-fluoro guanosine
  modified_base 8: mod_base = OTHER; note = 2'O-methyl adenosine
  modified_base 9: mod_base = OTHER; note = 2'-fluoro guanosine
  modified_base 10: mod_base = OTHER; note = 2'O-methyl uridine
  modified_base 11: mod_base = OTHER; note = 2'-fluoro cytidine
  modified_base 12: mod_base = OTHER; note = 2'O-methyl guanosine
  modified_base 13: mod_base = OTHER; note = 2'-fluoro guanosine
  modified_base 14: mod_base = OTHER; note = 2'O-methyl adenosine
  modified_base 15: mod_base = OTHER; note = 2'-fluoro adenosine
  modified_base 16: mod_base = OTHER; note = 2'O-methyl cytidine
  modified_base 17: mod_base = OTHER; note = 2'-fluoro adenosine
  modified_base 18: mod_base = OTHER; note = 2'O-methyl uridine
  modified_base 19: mod_base = OTHER; note = 2'-fluoro uridine phosphorothioate
  modified_base 20: mod_base = OTHER; note = 2'O-methyl uridine phosphorothioate
  modified_base 21: mod_base = OTHER; note = 2'O-methyl uridine
ggccaggagtcggaacatttt

SEQ ID NO: 967 - RNA, 21 nt, synthetic construct
  source 1..21: mol_type = other RNA
  modified_base 1: mod_base = OTHER; note = 2'-fluoro cytidine phosphorothioate
  modified_base 2: mod_base = OTHER; note = 2'O-methyl adenosine phosphorothioate
  modified_base 3: mod_base = OTHER; note = 2'-fluoro guanosine
  modified_base 4: mod_base = OTHER; note = 2'O-methyl guanosine
  modified_base 5: mod_base = OTHER; note = 2'-fluoro adenosine
  modified_base 6: mod_base = OTHER; note = 2'O-methyl guanosine
  modified_base 7: mod_base = OTHER; note = 2'-fluoro uridine
  modified_base 8: mod_base = OTHER; note = 2'O-methyl cytidine
  modified_base 9: mod_base = OTHER; note = 2'-fluoro guanosine
  modified_base 10: mod_base = OTHER; note = 2'O-methyl guanosine
  modified_base 11: mod_base = OTHER; note = 2'-fluoro adenosine
  modified_base 12: mod_base = OTHER; note = 2'O-methyl adenosine
  modified_base 13: mod_base = OTHER; note = 2'-fluoro cytidine
  modified_base 14: mod_base = OTHER; note = 2'O-methyl adenosine
  modified_base 15: mod_base = OTHER; note = 2'-fluoro uridine
  modified_base 16: mod_base = OTHER; note = 2'O-methyl uridine
  modified_base 17: mod_base = OTHER; note = 2'-fluoro guanosine
  modified_base 18: mod_base = OTHER; note = 2'O-methyl guanosine
  modified_base 19: mod_base = OTHER; note = 2'-fluoro cytidine phosphorothioate
  modified_base 20: mod_base = OTHER; note = 2'O-methyl uridine phosphorothioate
  modified_base 21: mod_base = OTHER; note = 2'O-methyl uridine
caggagtcggaacattggctt

SEQ ID NO: 968 - RNA, 21 nt, synthetic construct
  source 1..21: mol_type = other RNA
  modified_base 1: mod_base = OTHER; note = 2'-fluoro adenosine phosphorothioate
  modified_base 2: mod_base = OTHER; note = 2'O-methyl guanosine phosphorothioate
  modified_base 3: mod_base = OTHER; note = 2'-fluoro guanosine
  modified_base 4: mod_base = OTHER; note = 2'O-methyl adenosine
  modified_base 5: mod_base = OTHER; note = 2'-fluoro guanosine
  modified_base 6: mod_base = OTHER; note = 2'O-methyl uridine
  modified_base 7: mod_base = OTHER; note = 2'-fluoro cytidine
  modified_base 8: mod_base = OTHER; note = 2'O-methyl guanosine
  modified_base 9: mod_base = OTHER; note = 2'-fluoro guanosine
  modified_base 10: mod_base = OTHER; note = 2'O-methyl adenosine
  modified_base 11: mod_base = OTHER; note = 2'-fluoro adenosine
  modified_base 12: mod_base = OTHER; note = 2'O-methyl cytidine
  modified_base 13: mod_base = OTHER; note = 2'-fluoro adenosine
  modified_base 14: mod_base = OTHER; note = 2'O-methyl uridine
  modified_base 15: mod_base = OTHER; note = 2'-fluoro uridine
  modified_base 16: mod_base = OTHER; note = 2'O-methyl guanosine
  modified_base 17: mod_base = OTHER; note = 2'-fluoro guanosine
  modified_base 18: mod_base = OTHER; note = 2'O-methyl cytidine
  modified_base 19: mod_base = OTHER; note = 2'-fluoro adenosine phosphorothioate
  modified_base 20: mod_base = OTHER; note = 2'O-methyl uridine phosphorothioate
  modified_base 21: mod_base = OTHER; note = 2'O-methyl uridine
aggagtcggaacattggcatt

SEQ ID NO: 969 - RNA, 21 nt, synthetic construct
  source 1..21: mol_type = other RNA
  modified_base 1: mod_base = OTHER; note = 2'-fluoro cytidine phosphorothioate
  modified_base 2: mod_base = OTHER; note = 2'O-methyl guanosine phosphorothioate
  modified_base 3: mod_base = OTHER; note = 2'-fluoro guanosine
  modified_base 4: mod_base = OTHER; note = 2'O-methyl adenosine
  modified_base 5: mod_base = OTHER; note = 2'-fluoro adenosine
  modified_base 6: mod_base = OTHER; note = 2'O-methyl cytidine
  modified_base 7: mod_base = OTHER; note = 2'-fluoro adenosine
  modified_base 8: mod_base = OTHER; note = 2'O-methyl uridine
  modified_base 9: mod_base = OTHER; note = 2'-fluoro uridine
  modified_base 10: mod_base = OTHER; note = 2'O-methyl guanosine
  modified_base 11: mod_base = OTHER; note = 2'-fluoro guanosine
  modified_base 12: mod_base = OTHER; note = 2'O-methyl cytidine
  modified_base 13: mod_base = OTHER; note = 2'-fluoro adenosine
  modified_base 14: mod_base = OTHER; note = 2'O-methyl uridine
  modified_base 15: mod_base = OTHER; note = 2'-fluoro cytidine
  modified_base 16: mod_base = OTHER; note = 2'O-methyl uridine
  modified_base 17: mod_base = OTHER; note = 2'-fluoro uridine
  modified_base 18: mod_base = OTHER; note = 2'O-methyl cytidine
  modified_base 19: mod_base = OTHER; note = 2'-fluoro cytidine phosphorothioate
  modified_base 20: mod_base = OTHER; note = 2'O-methyl uridine phosphorothioate
  modified_base 21: mod_base = OTHER; note = 2'O-methyl uridine
cggaacattggcatcttcctt

SEQ ID NO: 970 - RNA, 21 nt, synthetic construct
  source 1..21: mol_type = other RNA
  modified_base 1: mod_base = OTHER; note = 2'-fluoro adenosine phosphorothioate
  modified_base 2: mod_base = OTHER; note = 2'O-methyl adenosine phosphorothioate
  modified_base 3: mod_base = OTHER; note = 2'-fluoro cytidine
  modified_base 4: mod_base = OTHER; note = 2'O-methyl adenosine
  modified_base 5: mod_base = OTHER; note = 2'-fluoro uridine
  modified_base 6: mod_base = OTHER; note = 2'O-methyl uridine
  modified_base 7: mod_base = OTHER; note = 2'-fluoro guanosine
  modified_base 8: mod_base = OTHER; note = 2'O-methyl guanosine
  modified_base 9: mod_base = OTHER; note = 2'-fluoro cytidine
  modified_base 10: mod_base = OTHER; note = 2'O-methyl adenosine
  modified_base 11: mod_base = OTHER; note = 2'-fluoro uridine
  modified_base 12: mod_base = OTHER; note = 2'O-methyl cytidine
  modified_base 13: mod_base = OTHER; note = 2'-fluoro uridine
  modified_base 14: mod_base = OTHER; note = 2'O-methyl uridine
  modified_base 15: mod_base = OTHER; note = 2'-fluoro cytidine
  modified_base 16: mod_base = OTHER; note = 2'O-methyl cytidine
  modified_base 17: mod_base = OTHER; note = 2'-fluoro adenosine
  modified_base 18: mod_base = OTHER; note = 2'O-methyl uridine
  modified_base 19: mod_base = OTHER; note = 2'-fluoro cytidine phosphorothioate
  modified_base 20: mod_base = OTHER; note = 2'O-methyl uridine phosphorothioate
  modified_base 21: mod_base = OTHER; note = 2'O-methyl uridine
aacattggcatcttccatctt

SEQ ID NO: 971 - RNA, 21 nt, synthetic construct
  source 1..21: mol_type = other RNA
  modified_base 1: mod_base = OTHER; note = 2'-fluoro adenosine phosphorothioate
  modified_base 2: mod_base = OTHER; note = 2'O-methyl cytidine phosphorothioate
  modified_base 3: mod_base = OTHER; note = 2'-fluoro adenosine
  modified_base 4: mod_base = OTHER; note = 2'O-methyl uridine
  modified_base 5: mod_base = OTHER; note = 2'-fluoro uridine
  modified_base 6: mod_base = OTHER; note = 2'O-methyl guanosine
  modified_base 7: mod_base = OTHER; note = 2'-fluoro guanosine
  modified_base 8: mod_base = OTHER; note = 2'O-methyl cytidine
  modified_base 9: mod_base = OTHER; note = 2'-fluoro adenosine
  modified_base 10: mod_base = OTHER; note = 2'O-methyl uridine
  modified_base 11: mod_base = OTHER; note = 2'-fluoro cytidine
  modified_base 12: mod_base = OTHER; note = 2'O-methyl uridine
  modified_base 13: mod_base = OTHER; note = 2'-fluoro uridine
  modified_base 14: mod_base = OTHER; note = 2'O-methyl cytidine
  modified_base 15: mod_base = OTHER; note = 2'-fluoro cytidine
  modified_base 16: mod_base = OTHER; note = 2'O-methyl adenosine
  modified_base 17: mod_base = OTHER; note = 2'-fluoro uridine
  modified_base 18: mod_base = OTHER; note = 2'O-methyl cytidine
  modified_base 19: mod_base = OTHER; note = 2'-fluoro cytidine phosphorothioate
  modified_base 20: mod_base = OTHER; note = 2'O-methyl uridine phosphorothioate
  modified_base 21: mod_base = OTHER; note = 2'O-methyl uridine
acattggcatcttccatcctt

SEQ ID NO: 972 - RNA, 21 nt, synthetic construct
  source 1..21: mol_type = other RNA
  modified_base 1: mod_base = OTHER; note = 2'-fluoro uridine phosphorothioate
  modified_base 2: mod_base = OTHER; note = 2'O-methyl cytidine phosphorothioate
  modified_base 3: mod_base = OTHER; note = 2'-fluoro cytidine
  modified_base 4: mod_base = OTHER; note = 2'O-methyl uridine
  modified_base 5: mod_base = OTHER; note = 2'-fluoro uridine
  modified_base 6: mod_base = OTHER; note = 2'O-methyl cytidine
  modified_base 7: mod_base = OTHER; note = 2'-fluoro adenosine
  modified_base 8: mod_base = OTHER; note = 2'O-methyl adenosine
  modified_base 9: mod_base = OTHER; note = 2'-fluoro cytidine
  modified_base 10: mod_base = OTHER; note = 2'O-methyl uridine
  modified_base 11: mod_base = OTHER; note = 2'-fluoro uridine
  modified_base 12: mod_base = OTHER; note = 2'O-methyl adenosine
  modified_base 13: mod_base = OTHER; note = 2'-fluoro adenosine
  modified_base 14: mod_base = OTHER; note = 2'O-methyl guanosine
  modified_base 15: mod_base = OTHER; note = 2'-fluoro cytidine
  modified_base 16: mod_base = OTHER; note = 2'O-methyl adenosine
  modified_base 17: mod_base = OTHER; note = 2'-fluoro adenosine
  modified_base 18: mod_base = OTHER; note = 2'O-methyl guanosine
  modified_base 19: mod_base = OTHER; note = 2'-fluoro uridine phosphorothioate
  modified_base 20: mod_base = OTHER; note = 2'O-methyl uridine phosphorothioate
  modified_base 21: mod_base = OTHER; note = 2'O-methyl uridine
tccttcaacttaagcaagttt

SEQ ID NO: 973 - RNA, 21 nt, synthetic construct
  source 1..21: mol_type = other RNA
  modified_base 1: mod_base = OTHER; note = 2'-fluoro cytidine phosphorothioate
  modified_base 2: mod_base = OTHER; note = 2'O-methyl uridine phosphorothioate
  modified_base 3: mod_base = OTHER; note = 2'-fluoro uridine
  modified_base 4: mod_base = OTHER; note = 2'O-methyl cytidine
  modified_base 5: mod_base = OTHER; note = 2'-fluoro adenosine
  modified_base 6: mod_base = OTHER; note = 2'O-methyl adenosine
  modified_base 7: mod_base = OTHER; note = 2'-fluoro cytidine
  modified_base 8: mod_base = OTHER; note = 2'O-methyl uridine
  modified_base 9: mod_base = OTHER; note = 2'-fluoro uridine
  modified_base 10: mod_base = OTHER; note = 2'O-methyl adenosine
  modified_base 11: mod_base = OTHER; note = 2'-fluoro adenosine
  modified_base 12: mod_base = OTHER; note = 2'O-methyl guanosine
  modified_base 13: mod_base = OTHER; note = 2'-fluoro cytidine
  modified_base 14: mod_base = OTHER; note = 2'O-methyl adenosine
  modified_base 15: mod_base = OTHER; note = 2'-fluoro adenosine
  modified_base 16: mod_base = OTHER; note = 2'O-methyl guanosine
  modified_base 17: mod_base = OTHER; note = 2'-fluoro uridine
  modified_base 18: mod_base = OTHER; note = 2'O-methyl uridine
  modified_base 19: mod_base = OTHER; note = 2'-fluoro cytidine phosphorothioate
  modified_base 20: mod_base = OTHER; note = 2'O-methyl uridine phosphorothioate
  modified_base 21: mod_base = OTHER; note = 2'O-methyl uridine
cttcaacttaagcaagttctt

SEQ ID NO: 974 - RNA, 21 nt, synthetic construct
  source 1..21: mol_type = other RNA
  modified_base 1: mod_base = OTHER; note = 2'-fluoro guanosine phosphorothioate
  modified_base 2: mod_base = OTHER; note = 2'O-methyl cytidine phosphorothioate
  modified_base 3: mod_base = OTHER; note = 2'-fluoro cytidine
  modified_base 4: mod_base = OTHER; note = 2'O-methyl uridine
  modified_base 5: mod_base = OTHER; note = 2'-fluoro cytidine
  modified_base 6: mod_base = OTHER; note = 2'O-methyl cytidine
  modified_base 7: mod_base = OTHER; note = 2'-fluoro cytidine
  modified_base 8: mod_base = OTHER; note = 2'O-methyl guanosine
  modified_base 9: mod_base = OTHER; note = 2'-fluoro guanosine
  modified_base 10: mod_base = OTHER; note = 2'O-methyl cytidine
  modified_base 11: mod_base = OTHER; note = 2'-fluoro cytidine
  modified_base 12: mod_base = OTHER; note = 2'O-methyl adenosine
  modified_base 13: mod_base = OTHER; note = 2'-fluoro adenosine
  modified_base 14: mod_base = OTHER; note = 2'O-methyl uridine
  modified_base 15: mod_base = OTHER; note = 2'-fluoro guanosine
  modified_base 16: mod_base = OTHER; note = 2'O-methyl uridine
  modified_base 17: mod_base = OTHER; note = 2'-fluoro cytidine
  modified_base 18: mod_base = OTHER; note = 2'O-methyl cytidine
  modified_base 19: mod_base = OTHER; note = 2'-fluoro adenosine phosphorothioate
  modified_base 20: mod_base = OTHER; note = 2'O-methyl uridine phosphorothioate
  modified_base 21: mod_base = OTHER; note = 2'O-methyl uridine
gcctcccggccaatgtccatt

SEQ ID NO: 975 - RNA, 21 nt, synthetic construct
  source 1..21: mol_type = other RNA
  modified_base 1: mod_base = OTHER; note = 2'-fluoro cytidine phosphorothioate
  modified_base 2: mod_base = OTHER; note = 2'O-methyl cytidine phosphorothioate
  modified_base 3: mod_base = OTHER; note = 2'-fluoro uridine
  modified_base 4: mod_base = OTHER; note = 2'O-methyl cytidine
  modified_base 5: mod_base = OTHER; note = 2'-fluoro cytidine
  modified_base 6: mod_base = OTHER; note = 2'O-methyl cytidine
  modified_base 7: mod_base = OTHER; note = 2'-fluoro guanosine
  modified_base 8: mod_base = OTHER; note = 2'O-methyl guanosine
  modified_base 9: mod_base = OTHER; note = 2'-fluoro cytidine
  modified_base 10: mod_base = OTHER; note = 2'O-methyl cytidine
  modified_base 11: mod_base = OTHER; note = 2'-fluoro adenosine
  modified_base 12: mod_base = OTHER; note = 2'O-methyl adenosine
  modified_base 13: mod_base = OTHER; note = 2'-fluoro uridine
  modified_base 14: mod_base = OTHER; note = 2'O-methyl guanosine
  modified_base 15: mod_base = OTHER; note = 2'-fluoro uridine
  modified_base 16: mod_base = OTHER; note = 2'O-methyl cytidine
  modified_base 17: mod_base = OTHER; note = 2'-fluoro cytidine
  modified_base 18: mod_base = OTHER; note = 2'O-methyl adenosine
  modified_base 19: mod_base = OTHER; note = 2'-fluoro cytidine phosphorothioate
  modified_base 20: mod_base = OTHER; note = 2'O-methyl uridine phosphorothioate
  modified_base 21: mod_base = OTHER; note = 2'O-methyl uridine
cctcccggccaatgtccactt

SEQ ID NO: 976 - RNA, 21 nt, synthetic construct
  source 1..21: mol_type = other RNA
  modified_base 1: mod_base = OTHER; note = 2'-fluoro cytidine phosphorothioate
  modified_base 2: mod_base = OTHER; note = 2'O-methyl cytidine phosphorothioate
  modified_base 3: mod_base = OTHER; note = 2'-fluoro adenosine
  modified_base 4: mod_base = OTHER; note = 2'O-methyl adenosine
  modified_base 5: mod_base = OTHER; note = 2'-fluoro uridine
  modified_base 6: mod_base = OTHER; note = 2'O-methyl guanosine
  modified_base 7: mod_base = OTHER; note = 2'-fluoro uridine
  modified_base 8: mod_base = OTHER; note = 2'O-methyl cytidine
  modified_base 9: mod_base = OTHER; note = 2'-fluoro cytidine
  modified_base 10: mod_base = OTHER; note = 2'O-methyl adenosine
  modified_base 11: mod_base = OTHER; note = 2'-fluoro cytidine
  modified_base 12: mod_base = OTHER; note = 2'O-methyl cytidine
  modified_base 13: mod_base = OTHER; note = 2'-fluoro adenosine
  modified_base 14: mod_base = OTHER; note = 2'O-methyl guanosine
  modified_base 15: mod_base = OTHER; note = 2'-fluoro cytidine
  modified_base 16: mod_base = OTHER; note = 2'O-methyl uridine
  modified_base 17: mod_base = OTHER; note = 2'-fluoro cytidine
  modified_base 18: mod_base = OTHER; note = 2'O-methyl adenosine
  modified_base 19: mod_base = OTHER; note = 2'-fluoro uridine phosphorothioate
  modified_base 20: mod_base = OTHER; note = 2'O-methyl uridine phosphorothioate
  modified_base 21: mod_base = OTHER; note = 2'O-methyl uridine
ccaatgtccaccagctcattt

SEQ ID NO: 977 - RNA, 21 nt, synthetic construct
  source 1..21: mol_type = other RNA
  modified_base 1: mod_base = OTHER; note = 2'-fluoro adenosine phosphorothioate
  modified_base 2: mod_base = OTHER; note = 2'O-methyl adenosine phosphorothioate
  modified_base 3: mod_base = OTHER; note = 2'-fluoro uridine
  modified_base 4: mod_base = OTHER; note = 2'O-methyl guanosine
  modified_base 5: mod_base = OTHER; note = 2'-fluoro uridine
  modified_base 6: mod_base = OTHER; note = 2'O-methyl cytidine
  modified_base 7: mod_base = OTHER; note = 2'-fluoro cytidine
  modified_base 8: mod_base = OTHER; note = 2'O-methyl adenosine
  modified_base 9: mod_base = OTHER; note = 2'-fluoro cytidine
  modified_base 10: mod_base = OTHER; note = 2'O-methyl cytidine
  modified_base 11: mod_base = OTHER; note = 2'-fluoro adenosine
  modified_base 12: mod_base = OTHER; note = 2'O-methyl guanosine
  modified_base 13: mod_base = OTHER; note = 2'-fluoro cytidine
  modified_base 14: mod_base = OTHER; note = 2'O-methyl uridine
  modified_base 15: mod_base = OTHER; note = 2'-fluoro cytidine
  modified_base 16: mod_base = OTHER; note = 2'O-methyl adenosine
  modified_base 17: mod_base = OTHER; note = 2'-fluoro uridine
  modified_base 18: mod_base = OTHER; note = 2'O-methyl cytidine
  modified_base 19: mod_base = OTHER; note = 2'-fluoro uridine phosphorothioate
  modified_base 20: mod_base = OTHER; note = 2'O-methyl uridine phosphorothioate
  modified_base 21: mod_base = OTHER; note = 2'O-methyl uridine
aatgtccaccagctcatcttt

SEQ ID NO: 978 - RNA, 21 nt, synthetic construct
  source 1..21: mol_type = other RNA
  modified_base 1: mod_base = OTHER; note = 2'-fluoro adenosine phosphorothioate
  modified_base 2: mod_base = OTHER; note = 2'O-methyl uridine phosphorothioate
  modified_base 3: mod_base = OTHER; note = 2'-fluoro guanosine
  modified_base 4: mod_base = OTHER; note = 2'O-methyl uridine
  modified_base 5: mod_base = OTHER; note = 2'-fluoro cytidine
  modified_base 6: mod_base = OTHER; note = 2'O-methyl cytidine
  modified_base 7: mod_base = OTHER; note = 2'-fluoro adenosine
  modified_base 8: mod_base = OTHER; note = 2'O-methyl cytidine
  modified_base 9: mod_base = OTHER; note = 2'-fluoro cytidine
  modified_base 10: mod_base = OTHER; note = 2'O-methyl adenosine
  modified_base 11: mod_base = OTHER; note = 2'-fluoro guanosine
  modified_base 12: mod_base = OTHER; note = 2'O-methyl cytidine
  modified_base 13: mod_base = OTHER; note = 2'-fluoro uridine
  modified_base 14: mod_base = OTHER; note = 2'O-methyl cytidine
  modified_base 15: mod_base = OTHER; note = 2'-fluoro adenosine
  modified_base 16: mod_base = OTHER; note = 2'O-methyl uridine
  modified_base 17: mod_base = OTHER; note = 2'-fluoro cytidine
  modified_base 18: mod_base = OTHER; note = 2'O-methyl uridine
  modified_base 19: mod_base = OTHER; note = 2'-fluoro cytidine phosphorothioate
  modified_base 20: mod_base = OTHER; note = 2'O-methyl uridine phosphorothioate
  modified_base 21: mod_base = OTHER; note = 2'O-methyl uridine
atgtccaccagctcatctctt

SEQ ID NO: 979 - RNA, 21 nt, synthetic construct
  source 1..21: mol_type = other RNA
  modified_base 1: mod_base = OTHER; note = 2'-fluoro guanosine phosphorothioate
  modified_base 2: mod_base = OTHER; note = 2'O-methyl uridine phosphorothioate
  modified_base 3: mod_base = OTHER; note = 2'-fluoro cytidine
  modified_base 4: mod_base = OTHER; note = 2'O-methyl cytidine
  modified_base 5: mod_base = OTHER; note = 2'-fluoro adenosine
  modified_base 6: mod_base = OTHER; note = 2'O-methyl cytidine
  modified_base 7: mod_base = OTHER; note = 2'-fluoro cytidine
  modified_base 8: mod_base = OTHER; note = 2'O-methyl adenosine
  modified_base 9: mod_base = OTHER; note = 2'-fluoro guanosine
  modified_base 10: mod_base = OTHER; note = 2'O-methyl cytidine
  modified_base 11: mod_base = OTHER; note = 2'-fluoro uridine
  modified_base 12: mod_base = OTHER; note = 2'O-methyl cytidine
  modified_base 13: mod_base = OTHER; note = 2'-fluoro adenosine
  modified_base 14: mod_base = OTHER; note = 2'O-methyl uridine
  modified_base 15: mod_base = OTHER; note = 2'-fluoro cytidine
  modified_base 16: mod_base = OTHER; note = 2'O-methyl uridine
  modified_base 17: mod_base = OTHER; note = 2'-fluoro cytidine
  modified_base 18: mod_base = OTHER; note = 2'O-methyl cytidine
  modified_base 19: mod_base = OTHER; note = 2'-fluoro guanosine phosphorothioate
  modified_base 20: mod_base = OTHER; note = 2'O-methyl uridine phosphorothioate
  modified_base 21: mod_base = OTHER; note = 2'O-methyl uridine
gtccaccagctcatctccgtt

SEQ ID NO: 980 - RNA, 21 nt, synthetic construct
  source 1..21: mol_type = other RNA
  modified_base 1: mod_base = OTHER; note = 2'-fluoro uridine phosphorothioate
  modified_base 2: mod_base = OTHER; note = 2'O-methyl cytidine phosphorothioate
  modified_base 3: mod_base = OTHER; note = 2'-fluoro cytidine
  modified_base 4: mod_base = OTHER; note = 2'O-methyl adenosine
  modified_base 5: mod_base = OTHER; note = 2'-fluoro cytidine
  modified_base 6: mod_base = OTHER; note = 2'O-methyl cytidine
  modified_base 7: mod_base = OTHER; note = 2'-fluoro adenosine
  modified_base 8: mod_base = OTHER; note = 2'O-methyl guanosine
  modified_base 9: mod_base = OTHER; note = 2'-fluoro cytidine
  modified_base 10: mod_base = OTHER; note = 2'O-methyl uridine
  modified_base 11: mod_base = OTHER; note = 2'-fluoro cytidine
  modified_base 12: mod_base = OTHER; note = 2'O-methyl adenosine
  modified_base 13: mod_base = OTHER; note = 2'-fluoro uridine
  modified_base 14: mod_base = OTHER; note = 2'O-methyl cytidine
  modified_base 15: mod_base = OTHER; note = 2'-fluoro uridine
  modified_base 16: mod_base = OTHER; note = 2'O-methyl cytidine
  modified_base 17: mod_base = OTHER; note = 2'-fluoro cytidine
  modified_base 18: mod_base = OTHER; note = 2'O-methyl guanosine
  modified_base 19: mod_base = OTHER; note = 2'-fluoro guanosine phosphorothioate
  modified_base 20: mod_base = OTHER; note = 2'O-methyl uridine phosphorothioate
  modified_base 21: mod_base = OTHER; note = 2'O-methyl uridine
tccaccagctcatctccggtt

SEQ ID NO: 981 - RNA, 21 nt, synthetic construct
  source 1..21: mol_type = other RNA
  modified_base 1: mod_base = OTHER; note = 2'-fluoro cytidine phosphorothioate
  modified_base 2: mod_base = OTHER; note = 2'O-methyl cytidine phosphorothioate
  modified_base 3: mod_base = OTHER; note = 2'-fluoro adenosine
  modified_base 4: mod_base = OTHER; note = 2'O-methyl guanosine
  modified_base 5: mod_base = OTHER; note = 2'-fluoro cytidine
  modified_base 6: mod_base = OTHER; note = 2'O-methyl uridine
  modified_base 7: mod_base = OTHER; note = 2'-fluoro cytidine
  modified_base 8: mod_base = OTHER; note = 2'O-methyl adenosine
  modified_base 9: mod_base = OTHER; note = 2'-fluoro uridine
  modified_base 10: mod_base = OTHER; note = 2'O-methyl cytidine
  modified_base 11: mod_base = OTHER; note = 2'-fluoro uridine
  modified_base 12: mod_base = OTHER; note = 2'O-methyl cytidine
  modified_base 13: mod_base = OTHER; note = 2'-fluoro cytidine
  modified_base 14: mod_base = OTHER; note = 2'O-methyl guanosine
  modified_base 15: mod_base = OTHER; note = 2'-fluoro guanosine
  modified_base 16: mod_base = OTHER; note = 2'O-methyl cytidine
  modified_base 17: mod_base = OTHER; note = 2'-fluoro adenosine
  modified_base 18: mod_base = OTHER; note = 2'O-methyl adenosine
  modified_base 19: mod_base = OTHER; note = 2'-fluoro adenosine phosphorothioate
  modified_base 20: mod_base = OTHER; note = 2'O-methyl uridine phosphorothioate
  modified_base 21: mod_base = OTHER; note = 2'O-methyl uridine
ccagctcatctccggcaaatt

SEQ ID NO: 982 - RNA, 21 nt, synthetic construct
  source 1..21: mol_type = other RNA
  modified_base 1: mod_base = OTHER; note = 2'-fluoro guanosine phosphorothioate
  modified_base 2: mod_base = OTHER; note = 2'O-methyl guanosine phosphorothioate
  modified_base 3: mod_base = OTHER; note = 2'-fluoro cytidine
  modified_base 4: mod_base = OTHER; note = 2'O-methyl adenosine
  modified_base 5: mod_base = OTHER; note = 2'-fluoro uridine
  modified_base 6: mod_base = OTHER; note = 2'O-methyl cytidine
  modified_base 7: mod_base = OTHER; note = 2'-fluoro uridine
  modified_base 8: mod_base = OTHER; note = 2'O-methyl cytidine
  modified_base 9: mod_base = OTHER; note = 2'-fluoro uridine
  modified_base 10: mod_base = OTHER; note = 2'O-methyl cytidine
  modified_base 11: mod_base = OTHER; note = 2'-fluoro uridine
  modified_base 12: mod_base = OTHER; note = 2'O-methyl uridine
  modified_base 13: mod_base = OTHER; note = 2'-fluoro adenosine
  modified_base 14: mod_base = OTHER; note = 2'O-methyl cytidine
  modified_base 15: mod_base = OTHER; note = 2'-fluoro cytidine
  modified_base 16: mod_base = OTHER; note = 2'O-methyl adenosine
  modified_base 17: mod_base = OTHER; note = 2'-fluoro guanosine
  modified_base 18: mod_base = OTHER; note = 2'O-methyl adenosine
  modified_base 19: mod_base = OTHER; note = 2'-fluoro guanosine phosphorothioate
  modified_base 20: mod_base = OTHER; note = 2'O-methyl uridine phosphorothioate
  modified_base 21: mod_base = OTHER; note = 2'O-methyl uridine
ggcatctctcttaccagagtt

SEQ ID NO: 983 - RNA, 21 nt, synthetic construct
  source 1..21: mol_type = other RNA
  modified_base 1: mod_base = OTHER; note = 2'-fluoro uridine phosphorothioate
  modified_base 2: mod_base = OTHER; note = 2'O-methyl cytidine phosphorothioate
  modified_base 3: mod_base = OTHER; note = 2'-fluoro uridine
  modified_base 4: mod_base = OTHER; note = 2'O-methyl uridine
  modified_base 5: mod_base = OTHER; note = 2'-fluoro adenosine
  modified_base 6: mod_base = OTHER; note = 2'O-methyl cytidine
  modified_base 7: mod_base = OTHER; note = 2'-fluoro cytidine
  modified_base 8: mod_base = OTHER; note = 2'O-methyl adenosine
  modified_base 9: mod_base = OTHER; note = 2'-fluoro guanosine
  modified_base 10: mod_base = OTHER; note = 2'O-methyl adenosine
  modified_base 11: mod_base = OTHER; note = 2'-fluoro guanosine
  modified_base 12: mod_base = OTHER; note = 2'O-methyl uridine
  modified_base 13: mod_base = OTHER; note = 2'-fluoro guanosine
  modified_base 14: mod_base = OTHER; note = 2'O-methyl uridine
  modified_base 15: mod_base = OTHER; note = 2'-fluoro cytidine
  modified_base 16: mod_base = OTHER; note = 2'O-methyl uridine
  modified_base 17: mod_base = OTHER; note = 2'-fluoro guanosine
  modified_base 18: mod_base = OTHER; note = 2'O-methyl adenosine
  modified_base 19: mod_base = OTHER; note = 2'-fluoro uridine phosphorothioate
  modified_base 20: mod_base = OTHER; note = 2'O-methyl uridine phosphorothioate
  modified_base 21: mod_base = OTHER; note = 2'O-methyl uridine
tcttaccagagtgtctgattt

SEQ ID NO: 984 - RNA, 21 nt, synthetic construct
  source 1..21: mol_type = other RNA
  modified_base 1: mod_base = OTHER; note = 2'-fluoro cytidine phosphorothioate
  modified_base 2: mod_base = OTHER; note = 2'O-methyl uridine phosphorothioate
  modified_base 3: mod_base = OTHER; note = 2'-fluoro uridine
  modified_base 4: mod_base = OTHER; note = 2'O-methyl adenosine
  modified_base 5: mod_base = OTHER; note = 2'-fluoro cytidine
  modified_base 6: mod_base = OTHER; note = 2'O-methyl cytidine
  modified_base 7: mod_base = OTHER; note = 2'-fluoro adenosine
  modified_base 8: mod_base = OTHER; note = 2'O-methyl guanosine
  modified_base 9: mod_base = OTHER; note = 2'-fluoro adenosine
  modified_base 10: mod_base = OTHER; note = 2'O-methyl guanosine
  modified_base 11: mod_base = OTHER; note = 2'-fluoro uridine
  modified_base 12: mod_base = OTHER; note = 2'O-methyl guanosine
  modified_base 13: mod_base = OTHER; note = 2'-fluoro uridine
  modified_base 14: mod_base = OTHER; note = 2'O-methyl cytidine
  modified_base 15: mod_base = OTHER; note = 2'-fluoro uridine
  modified_base 16: mod_base = OTHER; note = 2'O-methyl guanosine
  modified_base 17: mod_base = OTHER; note = 2'-fluoro adenosine
  modified_base 18: mod_base = OTHER; note = 2'O-methyl uridine
  modified_base 19: mod_base = OTHER; note = 2'-fluoro guanosine phosphorothioate
  modified_base 20: mod_base = OTHER; note = 2'O-methyl uridine phosphorothioate
  modified_base 21: mod_base = OTHER; note = 2'O-methyl uridine
cttaccagagtgtctgatgtt

SEQ ID NO: 985 - RNA, 21 nt, synthetic construct
  source 1..21: mol_type = other RNA
  modified_base 1: mod_base = OTHER; note = 2'-fluoro uridine phosphorothioate
  modified_base 2: mod_base = OTHER; note = 2'O-methyl uridine phosphorothioate
  modified_base 3: mod_base = OTHER; note = 2'-fluoro adenosine
  modified_base 4: mod_base = OTHER; note = 2'O-methyl cytidine
  modified_base 5: mod_base = OTHER; note = 2'-fluoro cytidine
  modified_base 6: mod_base = OTHER; note = 2'O-methyl adenosine
  modified_base 7: mod_base = OTHER; note = 2'-fluoro guanosine
  modified_base 8: mod_base = OTHER; note = 2'O-methyl adenosine
  modified_base 9: mod_base = OTHER; note = 2'-fluoro guanosine
  modified_base 10: mod_base = OTHER; note = 2'O-methyl uridine
  modified_base 11: mod_base = OTHER; note = 2'-fluoro guanosine
  modified_base 12: mod_base = OTHER; note = 2'O-methyl uridine
  modified_base 13: mod_base = OTHER; note = 2'-fluoro cytidine
  modified_base 14: mod_base = OTHER; note = 2'O-methyl uridine
  modified_base 15: mod_base = OTHER; note = 2'-fluoro guanosine
  modified_base 16: mod_base = OTHER; note = 2'O-methyl adenosine
  modified_base 17: mod_base = OTHER; note = 2'-fluoro uridine
  modified_base 18: mod_base = OTHER; note = 2'O-methyl guanosine
  modified_base 19: mod_base = OTHER; note = 2'-fluoro guanosine phosphorothioate
  modified_base 20: mod_base = OTHER; note = 2'O-methyl uridine phosphorothioate
  modified_base 21: mod_base = OTHER; note = 2'O-methyl uridine
ttaccagagtgtctgatggtt

SEQ ID NO: 986 - RNA, 21 nt, synthetic construct
  source 1..21: mol_type = other RNA
  modified_base 1: mod_base = OTHER; note = 2'-fluoro uridine phosphorothioate
  modified_base 2: mod_base = OTHER; note = 2'O-methyl adenosine phosphorothioate
  modified_base 3: mod_base = OTHER; note = 2'-fluoro cytidine
  modified_base 4: mod_base = OTHER; note = 2'O-methyl cytidine
  modified_base 5: mod_base = OTHER; note = 2'-fluoro adenosine
  modified_base 6: mod_base = OTHER; note = 2'O-methyl guanosine
  modified_base 7: mod_base = OTHER; note = 2'-fluoro adenosine
  modified_base 8: mod_base = OTHER; note = 2'O-methyl guanosine
  modified_base 9: mod_base = OTHER; note = 2'-fluoro uridine
  modified_base 10: mod_base = OTHER; note = 2'O-methyl guanosine
  modified_base 11: mod_base = OTHER; note = 2'-fluoro uridine
  modified_base 12: mod_base = OTHER; note = 2'O-methyl cytidine
  modified_base 13: mod_base = OTHER; note = 2'-fluoro uridine
  modified_base 14: mod_base = OTHER; note = 2'O-methyl guanosine
  modified_base 15: mod_base = OTHER; note = 2'-fluoro adenosine
  modified_base 16: mod_base = OTHER; note = 2'O-methyl uridine
  modified_base 17: mod_base = OTHER; note = 2'-fluoro guanosine
  modified_base 18: mod_base = OTHER; note = 2'O-methyl guanosine
  modified_base 19: mod_base = OTHER; note = 2'-fluoro guanosine phosphorothioate
  modified_base 20: mod_base = OTHER; note = 2'O-methyl uridine phosphorothioate
  modified_base 21: mod_base = OTHER; note = 2'O-methyl uridine
taccagagtgtctgatgggtt

SEQ ID NO: 987 - RNA, 21 nt, synthetic construct
  source 1..21: mol_type = other RNA
  modified_base 1: mod_base = OTHER; note = 2'-fluoro guanosine phosphorothioate
  modified_base 2: mod_base = OTHER; note = 2'O-methyl adenosine phosphorothioate
  modified_base 3: mod_base = OTHER; note = 2'-fluoro guanosine
  modified_base 4: mod_base = OTHER; note = 2'O-methyl uridine
  modified_base 5: mod_base = OTHER; note = 2'-fluoro guanosine
  modified_base 6: mod_base = OTHER; note = 2'O-methyl uridine
  modified_base 7: mod_base = OTHER; note = 2'-fluoro cytidine
  modified_base 8: mod_base = OTHER; note = 2'O-methyl uridine
  modified_base 9: mod_base = OTHER; note = 2'-fluoro guanosine
  modified_base 10: mod_base = OTHER; note = 2'O-methyl adenosine
  modified_base 11: mod_base = OTHER; note = 2'-fluoro uridine
  modified_base 12: mod_base = OTHER; note = 2'O-methyl guanosine
  modified_base 13: mod_base = OTHER; note = 2'-fluoro guanosine
  modified_base 14: mod_base = OTHER; note = 2'O-methyl guanosine
  modified_base 15: mod_base = OTHER; note = 2'-fluoro guanosine
  modified_base 16: mod_base = OTHER; note = 2'O-methyl adenosine
  modified_base 17: mod_base = OTHER; note = 2'-fluoro adenosine
  modified_base 18: mod_base = OTHER; note = 2'O-methyl adenosine
  modified_base 19: mod_base = OTHER; note = 2'-fluoro adenosine phosphorothioate
  modified_base 20: mod_base = OTHER; note = 2'O-methyl uridine phosphorothioate
  modified_base 21: mod_base = OTHER; note = 2'O-methyl uridine
gagtgtctgatggggaaaatt

SEQ ID NO: 988 - RNA, 21 nt, synthetic construct
  source 1..21: mol_type = other RNA
  modified_base 1: mod_base = OTHER; note = 2'-fluoro guanosine phosphorothioate
  modified_base 2: mod_base = OTHER; note = 2'O-methyl uridine phosphorothioate
  modified_base 3: mod_base = OTHER; note = 2'-fluoro guanosine
  modified_base 4: mod_base = OTHER; note = 2'O-methyl uridine
  modified_base 5: mod_base = OTHER; note = 2'-fluoro cytidine
  modified_base 6: mod_base = OTHER; note = 2'O-methyl uridine
  modified_base 7: mod_base = OTHER; note = 2'-fluoro guanosine
  modified_base 8: mod_base = OTHER; note = 2'O-methyl adenosine
  modified_base 9: mod_base = OTHER; note = 2'-fluoro uridine
  modified_base 10: mod_base = OTHER; note = 2'O-methyl guanosine
  modified_base 11: mod_base = OTHER; note = 2'-fluoro guanosine
  modified_base 12: mod_base = OTHER; note = 2'O-methyl guanosine
  modified_base 13: mod_base = OTHER; note = 2'-fluoro guanosine
  modified_base 14: mod_base = OTHER; note = 2'O-methyl adenosine
  modified_base 15: mod_base = OTHER; note = 2'-fluoro adenosine
  modified_base 16: mod_base = OTHER; note = 2'O-methyl adenosine
  modified_base 17: mod_base = OTHER; note = 2'-fluoro adenosine
  modified_base 18: mod_base = OTHER; note = 2'O-methyl cytidine
  modified_base 19: mod_base = OTHER; note = 2'-fluoro guanosine phosphorothioate
  modified_base 20: mod_base = OTHER; note = 2'O-methyl uridine phosphorothioate
  modified_base 21: mod_base = OTHER; note = 2'O-methyl uridine
gtgtctgatggggaaaacgtt

SEQ ID NO: 989 - RNA, 21 nt, synthetic construct
  source 1..21: mol_type = other RNA
  modified_base 1: mod_base = OTHER; note = 2'-fluoro uridine phosphorothioate
  modified_base 2: mod_base = OTHER; note = 2'O-methyl guanosine phosphorothioate
  modified_base 3: mod_base = OTHER; note = 2'-fluoro uridine
  modified_base 4: mod_base = OTHER; note = 2'O-methyl cytidine
  modified_base 5: mod_base = OTHER; note = 2'-fluoro uridine
  modified_base 6: mod_base = OTHER; note = 2'O-methyl guanosine
  modified_base 7: mod_base = OTHER; note = 2'-fluoro adenosine
  modified_base 8: mod_base = OTHER; note = 2'O-methyl uridine
  modified_base 9: mod_base = OTHER; note = 2'-fluoro guanosine
  modified_base 10: mod_base = OTHER; note = 2'O-methyl guanosine
  modified_base 11: mod_base = OTHER; note = 2'-fluoro guanosine
  modified_base 12: mod_base = OTHER; note = 2'O-methyl guanosine
  modified_base 13: mod_base = OTHER; note = 2'-fluoro adenosine
  modified_base 14: mod_base = OTHER; note = 2'O-methyl adenosine
  modified_base 15: mod_base = OTHER; note = 2'-fluoro adenosine
  modified_base 16: mod_base = OTHER; note = 2'O-methyl adenosine
  modified_base 17: mod_base = OTHER; note = 2'-fluoro cytidine
  modified_base 18: mod_base = OTHER; note = 2'O-methyl guanosine
  modified_base 19: mod_base = OTHER; note = 2'-fluoro uridine phosphorothioate
  modified_base 20: mod_base = OTHER; note = 2'O-methyl uridine phosphorothioate
  modified_base 21: mod_base = OTHER; note = 2'O-methyl uridine
tgtctgatggggaaaacgttt

SEQ ID NO: 990 - RNA, 21 nt, synthetic construct
  source 1..21: mol_type = other RNA
  modified_base 1: mod_base = OTHER; note = 2'-fluoro guanosine phosphorothioate
  modified_base 2: mod_base = OTHER; note = 2'O-methyl uridine phosphorothioate
  modified_base 3: mod_base = OTHER; note = 2'-fluoro cytidine
  modified_base 4: mod_base = OTHER; note = 2'O-methyl uridine
  modified_base 5: mod_base = OTHER; note = 2'-fluoro guanosine
  modified_base 6: mod_base = OTHER; note = 2'O-methyl adenosine
  modified_base 7: mod_base = OTHER; note = 2'-fluoro uridine
  modified_base 8: mod_base = OTHER; note = 2'O-methyl guanosine
  modified_base 9: mod_base = OTHER; note = 2'-fluoro guanosine
  modified_base 10: mod_base = OTHER; note = 2'O-methyl guanosine
  modified_base 11: mod_base = OTHER; note = 2'-fluoro guanosine
  modified_base 12: mod_base = OTHER; note = 2'O-methyl adenosine
  modified_base 13: mod_base = OTHER; note = 2'-fluoro adenosine
  modified_base 14: mod_base = OTHER; note = 2'O-methyl adenosine
  modified_base 15: mod_base = OTHER; note = 2'-fluoro adenosine
  modified_base 16: mod_base = OTHER; note = 2'O-methyl cytidine
  modified_base 17: mod_base = OTHER; note = 2'-fluoro guanosine
  modified_base 18: mod_base = OTHER; note = 2'O-methyl uridine
  modified_base 19: mod_base = OTHER; note = 2'-fluoro uridine phosphorothioate
  modified_base 20: mod_base = OTHER; note = 2'O-methyl uridine phosphorothioate
  modified_base 21: mod_base = OTHER; note = 2'O-methyl uridine
gtctgatggggaaaacgtttt

SEQ ID NO: 991 - RNA, 21 nt, synthetic construct
  source 1..21: mol_type = other RNA
  modified_base 1: mod_base = OTHER; note = 2'-fluoro uridine phosphorothioate
  modified_base 2: mod_base = OTHER; note = 2'O-methyl cytidine phosphorothioate
  modified_base 3: mod_base = OTHER; note = 2'-fluoro uridine
  modified_base 4: mod_base = OTHER; note = 2'O-methyl guanosine
  modified_base 5: mod_base = OTHER; note = 2'-fluoro adenosine
  modified_base 6: mod_base = OTHER; note = 2'O-methyl uridine
  modified_base 7: mod_base = OTHER; note = 2'-fluoro guanosine
  modified_base 8: mod_base = OTHER; note = 2'O-methyl guanosine
  modified_base 9: mod_base = OTHER; note = 2'-fluoro guanosine
  modified_base 10: mod_base = OTHER; note = 2'O-methyl guanosine
  modified_base 11: mod_base = OTHER; note = 2'-fluoro adenosine
  modified_base 12: mod_base = OTHER; note = 2'O-methyl adenosine
  modified_base 13: mod_base = OTHER; note = 2'-fluoro adenosine
  modified_base 14: mod_base = OTHER; note = 2'O-methyl adenosine
  modified_base 15: mod_base = OTHER; note = 2'-fluoro cytidine
  modified_base 16: mod_base = OTHER; note = 2'O-methyl guanosine
  modified_base 17: mod_base = OTHER; note = 2'-fluoro uridine
  modified_base 18: mod_base = OTHER; note = 2'O-methyl uridine
  modified_base 19: mod_base = OTHER; note = 2'-fluoro cytidine phosphorothioate
  modified_base 20: mod_base = OTHER; note = 2'O-methyl uridine phosphorothioate
  modified_base 21: mod_base = OTHER; note = 2'O-methyl uridine
tctgatggggaaaacgttctt

SEQ ID NO: 992 - RNA, 21 nt, synthetic construct
  source 1..21: mol_type = other RNA
  modified_base 1: mod_base = OTHER; note = 2'-fluoro cytidine phosphorothioate
  modified_base 2: mod_base = OTHER; note = 2'O-methyl uridine phosphorothioate
  modified_base 3: mod_base = OTHER; note = 2'-fluoro guanosine
  modified_base 4: mod_base = OTHER; note = 2'O-methyl adenosine
  modified_base 5: mod_base = OTHER; note = 2'-fluoro uridine
  modified_base 6: mod_base = OTHER; note = 2'O-methyl guanosine
  modified_base 7: mod_base = OTHER; note = 2'-fluoro guanosine
  modified_base 8: mod_base = OTHER; note = 2'O-methyl guanosine
  modified_base 9: mod_base = OTHER; note = 2'-fluoro guanosine
  modified_base 10: mod_base = OTHER; note = 2'O-methyl adenosine
  modified_base 11: mod_base = OTHER; note = 2'-fluoro adenosine
  modified_base 12: mod_base = OTHER; note = 2'O-methyl adenosine
  modified_base 13: mod_base = OTHER; note = 2'-fluoro adenosine
  modified_base 14: mod_base = OTHER; note = 2'O-methyl cytidine
  modified_base 15: mod_base = OTHER; note = 2'-fluoro guanosine
  modified_base 16: mod_base = OTHER; note = 2'O-methyl uridine
  modified_base 17: mod_base = OTHER; note = 2'-fluoro uridine
  modified_base 18: mod_base = OTHER; note = 2'O-methyl cytidine
  modified_base 19: mod_base = OTHER; note = 2'-fluoro uridine phosphorothioate
  modified_base 20: mod_base = OTHER; note = 2'O-methyl uridine phosphorothioate
  modified_base 21: mod_base = OTHER; note = 2'O-methyl uridine
ctgatggggaaaacgttcttt

SEQ ID NO: 993 - RNA, 21 nt, synthetic construct
  source 1..21: mol_type = other RNA
  modified_base 1: mod_base = OTHER; note = 2'-fluoro uridine phosphorothioate
  modified_base 2: mod_base = OTHER; note = 2'O-methyl guanosine phosphorothioate
  modified_base 3: mod_base = OTHER; note = 2'-fluoro adenosine
  modified_base 4: mod_base = OTHER; note = 2'O-methyl uridine
  modified_base 5: mod_base = OTHER; note = 2'-fluoro guanosine
  modified_base 6: mod_base = OTHER; note = 2'O-methyl guanosine
  modified_base 7: mod_base = OTHER; note = 2'-fluoro guanosine
  modified_base 8: mod_base = OTHER; note = 2'O-methyl guanosine
  modified_base 9: mod_base = OTHER; note = 2'-fluoro adenosine
  modified_base 10: mod_base = OTHER; note = 2'O-methyl adenosine
  modified_base 11: mod_base = OTHER; note = 2'-fluoro adenosine
  modified_base 12: mod_base = OTHER; note = 2'O-methyl adenosine
  modified_base 13: mod_base = OTHER; note = 2'-fluoro cytidine
  modified_base 14: mod_base = OTHER; note = 2'O-methyl guanosine
  modified_base 15: mod_base = OTHER; note = 2'-fluoro uridine
  modified_base 16: mod_base = OTHER; note = 2'O-methyl uridine
  modified_base 17: mod_base = OTHER; note = 2'-fluoro cytidine
  modified_base 18: mod_base = OTHER; note = 2'O-methyl uridine
  modified_base 19: mod_base = OTHER; note = 2'-fluoro guanosine phosphorothioate
  modified_base 20: mod_base = OTHER; note = 2'O-methyl uridine phosphorothioate
  modified_base 21: mod_base = OTHER; note = 2'O-methyl uridine
tgatggggaaaacgttctgtt

SEQ ID NO: 994 - RNA, 21 nt, synthetic construct
  source 1..21: mol_type = other RNA
  modified_base 1: mod_base = OTHER; note = 2'-fluoro guanosine phosphorothioate
  modified_base 2: mod_base = OTHER; note = 2'O-methyl adenosine phosphorothioate
  modified_base 3: mod_base = OTHER; note = 2'-fluoro uridine
  modified_base 4: mod_base = OTHER; note = 2'O-methyl guanosine
  modified_base 5: mod_base = OTHER; note = 2'-fluoro guanosine
  modified_base 6: mod_base = OTHER; note = 2'O-methyl guanosine
  modified_base 7: mod_base = OTHER; note = 2'-fluoro guanosine
  modified_base 8: mod_base = OTHER; note = 2'O-methyl adenosine
  modified_base 9: mod_base = OTHER; note = 2'-fluoro adenosine
  modified_base 10: mod_base = OTHER; note = 2'O-methyl adenosine
  modified_base 11: mod_base = OTHER; note = 2'-fluoro adenosine
  modified_base 12: mod_base = OTHER; note = 2'O-methyl cytidine
  modified_base 13: mod_base = OTHER; note = 2'-fluoro guanosine
  modified_base 14: mod_base = OTHER; note = 2'O-methyl uridine
  modified_base 15: mod_base = OTHER; note = 2'-fluoro uridine
  modified_base 16: mod_base = OTHER; note = 2'O-methyl cytidine
  modified_base 17: mod_base = OTHER; note = 2'-fluoro uridine
  modified_base 18: mod_base = OTHER; note = 2'O-methyl guanosine
  modified_base 19: mod_base = OTHER; note = 2'-fluoro guanosine phosphorothioate
  modified_base 20: mod_base = OTHER; note = 2'O-methyl uridine phosphorothioate
  modified_base 21: mod_base = OTHER; note = 2'O-methyl uridine
gatggggaaaacgttctggtt

SEQ ID NO: 995 - RNA, 21 nt, synthetic construct
  source 1..21: mol_type = other RNA
  modified_base 1: mod_base = OTHER; note = 2'-fluoro uridine phosphorothioate
  modified_base 2: mod_base = OTHER; note = 2'O-methyl guanosine phosphorothioate
  modified_base 3: mod_base = OTHER; note = 2'-fluoro guanosine
  modified_base 4: mod_base = OTHER; note = 2'O-methyl guanosine
  modified_base 5: mod_base = OTHER; note = 2'-fluoro guanosine
  modified_base 6: mod_base = OTHER; note = 2'O-methyl adenosine
  modified_base 7: mod_base = OTHER; note = 2'-fluoro adenosine
  modified_base 8: mod_base = OTHER; note = 2'O-methyl adenosine
  modified_base 9: mod_base = OTHER; note = 2'-fluoro adenosine
  modified_base 10: mod_base = OTHER; note = 2'O-methyl cytidine
  modified_base 11: mod_base = OTHER; note = 2'-fluoro guanosine
  modified_base 12: mod_base = OTHER; note = 2'O-methyl uridine
  modified_base 13: mod_base = OTHER; note = 2'-fluoro uridine
  modified_base 14: mod_base = OTHER; note = 2'O-methyl cytidine
  modified_base 15: mod_base = OTHER; note = 2'-fluoro uridine
  modified_base 16: mod_base = OTHER; note = 2'O-methyl guanosine
  modified_base 17: mod_base = OTHER; note = 2'-fluoro guanosine
  modified_base 18: mod_base = OTHER; note = 2'O-methyl uridine
  modified_base 19: mod_base = OTHER; note = 2'-fluoro guanosine phosphorothioate
  modified_base 20: mod_base = OTHER; note = 2'O-methyl uridine phosphorothioate
  modified_base 21: mod_base = OTHER; note = 2'O-methyl uridine
tggggaaaacgttctggtgtt

SEQ ID NO: 996 - RNA, 21 nt, synthetic construct
  source 1..21: mol_type = other RNA
  modified_base 1: mod_base = OTHER; note = 2'-fluoro guanosine phosphorothioate
  modified_base 2: mod_base = OTHER; note = 2'O-methyl guanosine phosphorothioate
  modified_base 3: mod_base = OTHER; note = 2'-fluoro guanosine
  modified_base 4: mod_base = OTHER; note = 2'O-methyl adenosine
  modified_base 5: mod_base = OTHER; note = 2'-fluoro adenosine
  modified_base 6: mod_base = OTHER; note = 2'O-methyl adenosine
  modified_base 7: mod_base = OTHER; note = 2'-fluoro adenosine
  modified_base 8: mod_base = OTHER; note = 2'O-methyl cytidine
  modified_base 9: mod_base = OTHER; note = 2'-fluoro guanosine
  modified_base 10: mod_base = OTHER; note = 2'O-methyl uridine
  modified_base 11: mod_base = OTHER; note = 2'-fluoro uridine
  modified_base 12: mod_base = OTHER; note = 2'O-methyl cytidine
  modified_base 13: mod_base = OTHER; note = 2'-fluoro uridine
  modified_base 14: mod_base = OTHER; note = 2'O-methyl guanosine
  modified_base 15: mod_base = OTHER; note = 2'-fluoro guanosine
  modified_base 16: mod_base = OTHER; note = 2'O-methyl uridine
  modified_base 17: mod_base = OTHER; note = 2'-fluoro guanosine
  modified_base 18: mod_base = OTHER; note = 2'O-methyl uridine
  modified_base 19: mod_base = OTHER; note = 2'-fluoro cytidine phosphorothioate
  modified_base 20: mod_base = OTHER; note = 2'O-methyl uridine phosphorothioate
  modified_base 21: mod_base = OTHER; note = 2'O-methyl uridine
gggaaaacgttctggtgtctt

SEQ ID NO: 997 - RNA, 21 nt, synthetic construct
  source 1..21: mol_type = other RNA
  modified_base 1: mod_base = OTHER; note = 2'-fluoro guanosine phosphorothioate
  modified_base 2: mod_base = OTHER; note = 2'O-methyl guanosine phosphorothioate
  modified_base 3: mod_base = OTHER; note = 2'-fluoro adenosine
  modified_base 4: mod_base = OTHER; note = 2'O-methyl adenosine
  modified_base 5: mod_base = OTHER; note = 2'-fluoro adenosine
  modified_base 6: mod_base = OTHER; note = 2'O-methyl adenosine
  modified_base 7: mod_base = OTHER; note = 2'-fluoro cytidine
  modified_base 8: mod_base = OTHER; note = 2'O-methyl guanosine
  modified_base 9: mod_base = OTHER; note = 2'-fluoro uridine
  modified_base 10: mod_base = OTHER; note = 2'O-methyl uridine
  modified_base 11: mod_base = OTHER; note = 2'-fluoro cytidine
  modified_base 12: mod_base = OTHER; note = 2'O-methyl uridine
  modified_base 13: mod_base = OTHER; note = 2'-fluoro guanosine
  modified_base 14: mod_base = OTHER; note = 2'O-methyl guanosine
  modified_base 15: mod_base = OTHER; note = 2'-fluoro uridine
  modified_base 16: mod_base = OTHER; note = 2'O-methyl guanosine
  modified_base 17: mod_base = OTHER; note = 2'-fluoro uridine
  modified_base 18: mod_base = OTHER; note = 2'O-methyl cytidine
  modified_base 19: mod_base = OTHER; note = 2'-fluoro uridine phosphorothioate
  modified_base 20: mod_base = OTHER; note = 2'O-methyl uridine phosphorothioate
  modified_base 21: mod_base = OTHER; note = 2'O-methyl uridine
ggaaaacgttctggtgtcttt

SEQ ID NO: 998 - RNA, 21 nt, synthetic construct
  source 1..21: mol_type = other RNA
  modified_base 1: mod_base = OTHER; note = 2'-fluoro adenosine phosphorothioate
  modified_base 2: mod_base = OTHER; note = 2'O-methyl adenosine phosphorothioate
  modified_base 3: mod_base = OTHER; note = 2'-fluoro adenosine
  modified_base 4: mod_base = OTHER; note = 2'O-methyl cytidine
  modified_base 5: mod_base = OTHER; note = 2'-fluoro guanosine
  modified_base 6: mod_base = OTHER; note = 2'O-methyl uridine
  modified_base 7: mod_base = OTHER; note = 2'-fluoro uridine
  modified_base 8: mod_base = OTHER; note = 2'O-methyl cytidine
  modified_base 9: mod_base = OTHER; note = 2'-fluoro uridine
  modified_base 10: mod_base = OTHER; note = 2'O-methyl guanosine
  modified_base 11: mod_base = OTHER; note = 2'-fluoro guanosine
  modified_base 12: mod_base = OTHER; note = 2'O-methyl uridine
  modified_base 13: mod_base = OTHER; note = 2'-fluoro guanosine
  modified_base 14: mod_base = OTHER; note = 2'O-methyl uridine
  modified_base 15: mod_base = OTHER; note = 2'-fluoro cytidine
  modified_base 16: mod_base = OTHER; note = 2'O-methyl uridine
  modified_base 17: mod_base = OTHER; note = 2'-fluoro guanosine
  modified_base 18: mod_base = OTHER; note = 2'O-methyl adenosine
  modified_base 19: mod_base = OTHER; note = 2'-fluoro cytidine phosphorothioate
  modified_base 20: mod_base = OTHER; note = 2'O-methyl uridine phosphorothioate
  modified_base 21: mod_base = OTHER; note = 2'O-methyl uridine
aaacgttctggtgtctgactt

SEQ ID NO: 999 - RNA, 21 nt, synthetic construct
  source 1..21: mol_type = other RNA
  modified_base 1: mod_base = OTHER; note = 2'-fluoro adenosine phosphorothioate
  modified_base 2: mod_base = OTHER; note = 2'O-methyl adenosine phosphorothioate
  modified_base 3: mod_base = OTHER; note = 2'-fluoro cytidine
  modified_base 4: mod_base = OTHER; note = 2'O-methyl guanosine
  modified_base 5: mod_base = OTHER; note = 2'-fluoro uridine
  modified_base 6: mod_base = OTHER; note = 2'O-methyl uridine
  modified_base 7: mod_base = OTHER; note = 2'-fluoro cytidine
  modified_base 8: mod_base = OTHER; note = 2'O-methyl uridine
  modified_base 9: mod_base = OTHER; note = 2'-fluoro guanosine
  modified_base 10: mod_base = OTHER; note = 2'O-methyl guanosine
  modified_base 11: mod_base = OTHER; note = 2'-fluoro uridine
  modified_base 12: mod_base = OTHER; note = 2'O-methyl guanosine
  modified_base 13: mod_base = OTHER; note = 2'-fluoro uridine
  modified_base 14: mod_base = OTHER; note = 2'O-methyl cytidine
  modified_base 15: mod_base = OTHER; note = 2'-fluoro uridine
  modified_base 16: mod_base = OTHER; note = 2'O-methyl guanosine
  modified_base 17: mod_base = OTHER; note = 2'-fluoro adenosine
  modified_base 18: mod_base = OTHER; note = 2'O-methyl cytidine
  modified_base 19: mod_base = OTHER; note = 2'-fluoro uridine phosphorothioate
  modified_base 20: mod_base = OTHER; note = 2'O-methyl uridine phosphorothioate
  modified_base 21: mod_base = OTHER; note = 2'O-methyl uridine
aacgttctggtgtctgacttt

SEQ ID NO: 1000 - RNA, 21 nt, synthetic construct
  source 1..21: mol_type = other RNA
  modified_base 1: mod_base = OTHER; note = 2'-fluoro adenosine phosphorothioate
  modified_base 2: mod_base = OTHER; note = 2'O-methyl cytidine phosphorothioate
  modified_base 3: mod_base = OTHER; note = 2'-fluoro guanosine
  modified_base 4: mod_base = OTHER; note = 2'O-methyl uridine
  modified_base 5: mod_base = OTHER; note = 2'-fluoro uridine
  modified_base 6: mod_base = OTHER; note = 2'O-methyl cytidine
  modified_base 7: mod_base = OTHER; note = 2'-fluoro uridine
  modified_base 8: mod_base = OTHER; note = 2'O-methyl guanosine
  modified_base 9: mod_base = OTHER; note = 2'-fluoro guanosine
  modified_base 10: mod_base = OTHER; note = 2'O-methyl uridine
  modified_base 11: mod_base = OTHER; note = 2'-fluoro guanosine
  modified_base 12: mod_base = OTHER; note = 2'O-methyl uridine
  modified_base 13: mod_base = OTHER; note = 2'-fluoro cytidine
  modified_base 14: mod_base = OTHER; note = 2'O-methyl uridine
  modified_base 15: mod_base = OTHER; note = 2'-fluoro guanosine
  modified_base 16: mod_base = OTHER; note = 2'O-methyl adenosine
  modified_base 17: mod_base = OTHER; note = 2'-fluoro cytidine
  modified_base 18: mod_base = OTHER; note = 2'O-methyl uridine
  modified_base 19: mod_base = OTHER; note = 2'-fluoro uridine phosphorothioate
  modified_base 20: mod_base = OTHER; note = 2'O-methyl uridine phosphorothioate
  modified_base 21: mod_base = OTHER; note = 2'O-methyl uridine
acgttctggtgtctgactttt

SEQ ID NO: 1001 - RNA, 21 nt, synthetic construct
  source 1..21: mol_type = other RNA
  modified_base 1: mod_base = OTHER; note = 2'-fluoro cytidine phosphorothioate
  modified_base 2: mod_base = OTHER; note = 2'O-methyl guanosine phosphorothioate
  modified_base 3: mod_base = OTHER; note = 2'-fluoro uridine
  modified_base 4: mod_base = OTHER; note = 2'O-methyl uridine
  modified_base 5: mod_base = OTHER; note = 2'-fluoro cytidine
  modified_base 6: mod_base = OTHER; note = 2'O-methyl uridine
  modified_base 7: mod_base = OTHER; note = 2'-fluoro guanosine
  modified_base 8: mod_base = OTHER; note = 2'O-methyl guanosine
  modified_base 9: mod_base = OTHER; note = 2'-fluoro uridine
  modified_base 10: mod_base = OTHER; note = 2'O-methyl guanosine
  modified_base 11: mod_base = OTHER; note = 2'-fluoro uridine
  modified_base 12: mod_base = OTHER; note = 2'O-methyl cytidine
  modified_base 13: mod_base = OTHER; note = 2'-fluoro uridine
  modified_base 14: mod_base = OTHER; note = 2'O-methyl guanosine
  modified_base 15: mod_base = OTHER; note = 2'-fluoro adenosine
  modified_base 16: mod_base = OTHER; note = 2'O-methyl cytidine
  modified_base 17: mod_base = OTHER; note = 2'-fluoro uridine
  modified_base 18: mod_base = OTHER; note = 2'O-methyl uridine
  modified_base 19: mod_base = OTHER; note = 2'-fluoro uridine phosphorothioate
  modified_base 20: mod_base = OTHER; note = 2'O-methyl uridine phosphorothioate
  modified_base 21: mod_base = OTHER; note = 2'O-methyl uridine
cgttctggtgtctgacttttt

SEQ ID NO: 1002 - RNA, 21 nt, synthetic construct
  source 1..21: mol_type = other RNA
  modified_base 1: mod_base = OTHER; note = 2'-fluoro guanosine phosphorothioate
  modified_base 2: mod_base = OTHER; note = 2'O-methyl uridine phosphorothioate
  modified_base 3: mod_base = OTHER; note = 2'-fluoro uridine
  modified_base 4: mod_base = OTHER; note = 2'O-methyl cytidine
  modified_base 5: mod_base = OTHER; note = 2'-fluoro uridine
  modified_base 6: mod_base = OTHER; note = 2'O-methyl guanosine
  modified_base 7: mod_base = OTHER; note = 2'-fluoro guanosine
  modified_base 8: mod_base = OTHER; note = 2'O-methyl uridine
  modified_base 9: mod_base = OTHER; note = 2'-fluoro guanosine
  modified_base 10: mod_base = OTHER; note = 2'O-methyl uridine
  modified_base 11: mod_base = OTHER; note = 2'-fluoro cytidine
  modified_base 12: mod_base = OTHER; note = 2'O-methyl uridine
  modified_base 13: mod_base = OTHER; note = 2'-fluoro guanosine
  modified_base 14: mod_base = OTHER; note = 2'O-methyl adenosine
  modified_base 15: mod_base = OTHER; note = 2'-fluoro cytidine
  modified_base 16: mod_base = OTHER; note = 2'O-methyl uridine
  modified_base 17: mod_base = OTHER; note = 2'-fluoro uridine
  modified_base 18: mod_base = OTHER; note = 2'O-methyl uridine
  modified_base 19: mod_base = OTHER; note = 2'-fluoro cytidine phosphorothioate
  modified_base 20: mod_base = OTHER; note = 2'O-methyl uridine phosphorothioate
  modified_base 21: mod_base = OTHER; note = 2'O-methyl uridine
gttctggtgtctgactttctt

SEQ ID NO: 1003 - RNA, 21 nt, synthetic construct
  source 1..21: mol_type = other RNA
  modified_base 1: mod_base = OTHER; note = 2'-fluoro uridine phosphorothioate
  modified_base 2: mod_base = OTHER; note = 2'O-methyl uridine phosphorothioate
  modified_base 3: mod_base = OTHER; note = 2'-fluoro cytidine
  modified_base 4: mod_base = OTHER; note = 2'O-methyl uridine
  modified_base 5: mod_base = OTHER; note = 2'-fluoro guanosine
  modified_base 6: mod_base = OTHER; note = 2'O-methyl guanosine
  modified_base 7: mod_base = OTHER; note = 2'-fluoro uridine
  modified_base 8: mod_base = OTHER; note = 2'O-methyl guanosine
  modified_base 9: mod_base = OTHER; note = 2'-fluoro uridine
  modified_base 10: mod_base = OTHER; note = 2'O-methyl cytidine
  modified_base 11: mod_base = OTHER; note = 2'-fluoro uridine
  modified_base 12: mod_base = OTHER; note = 2'O-methyl guanosine
  modified_base 13: mod_base = OTHER; note = 2'-fluoro adenosine
  modified_base 14: mod_base = OTHER; note = 2'O-methyl cytidine
  modified_base 15: mod_base = OTHER; note = 2'-fluoro uridine
  modified_base 16: mod_base = OTHER; note = 2'O-methyl uridine
  modified_base 17: mod_base = OTHER; note = 2'-fluoro uridine
  modified_base 18: mod_base = OTHER; note = 2'O-methyl cytidine
  modified_base 19: mod_base = OTHER; note = 2'-fluoro guanosine phosphorothioate
  modified_base 20: mod_base = OTHER; note = 2'O-methyl uridine phosphorothioate
  modified_base 21: mod_base = OTHER; note = 2'O-methyl uridine
ttctggtgtctgactttcgtt

SEQ ID NO: 1004 - RNA, 21 nt, synthetic construct
  source 1..21: mol_type = other RNA
  modified_base 1: mod_base = OTHER; note = 2'-fluoro cytidine phosphorothioate
  modified_base 2: mod_base = OTHER; note = 2'O-methyl uridine phosphorothioate
  modified_base 3: mod_base = OTHER; note = 2'-fluoro guanosine
  modified_base 4: mod_base = OTHER; note = 2'O-methyl guanosine
  modified_base 5: mod_base = OTHER; note = 2'-fluoro uridine
  modified_base 6: mod_base = OTHER; note = 2'O-methyl guanosine
  modified_base 7: mod_base = OTHER; note = 2'-fluoro uridine
  modified_base 8: mod_base = OTHER; note = 2'O-methyl cytidine
  modified_base 9: mod_base = OTHER; note = 2'-fluoro uridine
  modified_base 10: mod_base = OTHER; note = 2'O-methyl guanosine
  modified_base 11: mod_base = OTHER; note = 2'-fluoro adenosine
  modified_base 12: mod_base = OTHER; note = 2'O-methyl cytidine
  modified_base 13: mod_base = OTHER; note = 2'-fluoro uridine
  modified_base 14: mod_base = OTHER; note = 2'O-methyl uridine
  modified_base 15: mod_base = OTHER; note = 2'-fluoro uridine
  modified_base 16: mod_base = OTHER; note = 2'O-methyl cytidine
  modified_base 17: mod_base = OTHER; note = 2'-fluoro guanosine
  modified_base 18: mod_base = OTHER; note = 2'O-methyl guanosine
  modified_base 19: mod_base = OTHER; note = 2'-fluoro uridine phosphorothioate
  modified_base 20: mod_base = OTHER; note = 2'O-methyl uridine phosphorothioate
  modified_base 21: mod_base = OTHER; note = 2'O-methyl uridine
ctggtgtctgactttcggttt

SEQ ID NO: 1005 - RNA, 21 nt, synthetic construct
  source 1..21: mol_type = other RNA
  modified_base 1: mod_base = OTHER; note = 2'-fluoro uridine phosphorothioate
  modified_base 2: mod_base = OTHER; note = 2'O-methyl guanosine phosphorothioate
  modified_base 3: mod_base = OTHER; note = 2'-fluoro guanosine
  modified_base 4: mod_base = OTHER; note = 2'O-methyl uridine
  modified_base 5: mod_base = OTHER; note = 2'-fluoro guanosine
  modified_base 6: mod_base = OTHER; note = 2'O-methyl uridine
  modified_base 7: mod_base = OTHER; note = 2'-fluoro cytidine
  modified_base 8: mod_base = OTHER; note = 2'O-methyl uridine
  modified_base 9: mod_base = OTHER; note = 2'-fluoro guanosine
  modified_base 10: mod_base = OTHER; note = 2'O-methyl adenosine
  modified_base 11: mod_base = OTHER; note = 2'-fluoro cytidine
  modified_base 12: mod_base = OTHER; note = 2'O-methyl uridine
  modified_base 13: mod_base = OTHER; note = 2'-fluoro uridine
  modified_base 14: mod_base = OTHER; note = 2'O-methyl uridine
  modified_base 15: mod_base = OTHER; note = 2'-fluoro cytidine
  modified_base 16: mod_base = OTHER; note = 2'O-methyl guanosine
  modified_base 17: mod_base = OTHER; note = 2'-fluoro guanosine
  modified_base 18: mod_base = OTHER; note = 2'O-methyl uridine
  modified_base 19: mod_base = OTHER; note = 2'-fluoro cytidine phosphorothioate
  modified_base 20: mod_base = OTHER; note = 2'O-methyl uridine phosphorothioate
  modified_base 21: mod_base = OTHER; note = 2'O-methyl uridine
tggtgtctgactttcggtctt

SEQ ID NO: 1006 - RNA, 21 nt, synthetic construct
  source 1..21: mol_type = other RNA
  modified_base 1: mod_base = OTHER; note = 2'-fluoro guanosine phosphorothioate
  modified_base 2: mod_base = OTHER; note = 2'O-methyl guanosine phosphorothioate
  modified_base 3: mod_base = OTHER; note = 2'-fluoro uridine
  modified_base 4: mod_base = OTHER; note = 2'O-methyl guanosine
  modified_base 5: mod_base = OTHER; note = 2'-fluoro uridine
  modified_base 6: mod_base = OTHER; note = 2'O-methyl cytidine
  modified_base 7: mod_base = OTHER; note = 2'-fluoro uridine
  modified_base 8: mod_base = OTHER; note = 2'O-methyl guanosine
  modified_base 9: mod_base = OTHER; note = 2'-fluoro adenosine
  modified_base 10: mod_base = OTHER; note = 2'O-methyl cytidine
  modified_base 11: mod_base = OTHER; note = 2'-fluoro uridine
  modified_base 12: mod_base = OTHER; note = 2'O-methyl uridine
  modified_base 13: mod_base = OTHER; note = 2'-fluoro uridine
  modified_base 14: mod_base = OTHER; note = 2'O-methyl cytidine
  modified_base 15: mod_base = OTHER; note = 2'-fluoro guanosine
  modified_base 16: mod_base = OTHER; note = 2'O-methyl guanosine
  modified_base 17: mod_base = OTHER; note = 2'-fluoro uridine
  modified_base 18: mod_base = OTHER; note = 2'O-methyl cytidine
  modified_base 19: mod_base = OTHER; note = 2'-fluoro cytidine phosphorothioate
  modified_base 20: mod_base = OTHER; note = 2'O-methyl uridine phosphorothioate
  modified_base 21: mod_base = OTHER; note = 2'O-methyl uridine
ggtgtctgactttcggtcctt

SEQ ID NO: 1007 - RNA, 21 nt, synthetic construct
  source 1..21: mol_type = other RNA
  modified_base 1: mod_base = OTHER; note = 2'-fluoro guanosine phosphorothioate
  modified_base 2: mod_base = OTHER; note = 2'O-methyl uridine phosphorothioate
  modified_base 3: mod_base = OTHER; note = 2'-fluoro guanosine
  modified_base 4: mod_base = OTHER; note = 2'O-methyl uridine
  modified_base 5: mod_base = OTHER; note = 2'-fluoro cytidine
  modified_base 6: mod_base = OTHER; note = 2'O-methyl uridine
  modified_base 7: mod_base = OTHER; note = 2'-fluoro guanosine
  modified_base 8: mod_base = OTHER; note = 2'O-methyl adenosine
  modified_base 9: mod_base = OTHER; note = 2'-fluoro cytidine
  modified_base 10: mod_base = OTHER; note = 2'O-methyl uridine
  modified_base 11: mod_base = OTHER; note = 2'-fluoro uridine
  modified_base 12: mod_base = OTHER; note = 2'O-methyl uridine
  modified_base 13: mod_base = OTHER; note = 2'-fluoro cytidine
  modified_base 14: mod_base = OTHER; note = 2'O-methyl guanosine
  modified_base 15: mod_base = OTHER; note = 2'-fluoro guanosine
  modified_base 16: mod_base = OTHER; note = 2'O-methyl uridine
  modified_base 17: mod_base = OTHER; note = 2'-fluoro cytidine
  modified_base 18: mod_base = OTHER; note = 2'O-methyl cytidine
  modified_base 19: mod_base = OTHER; note = 2'-fluoro adenosine phosphorothioate
  modified_base 20: mod_base = OTHER; note = 2'O-methyl uridine phosphorothioate
  modified_base 21: mod_base = OTHER; note = 2'O-methyl uridine
gtgtctgactttcggtccatt

SEQ ID NO: 1008 - RNA, 21 nt, synthetic construct
  source 1..21: mol_type = other RNA
  modified_base 1: mod_base = OTHER; note = 2'-fluoro uridine phosphorothioate
  modified_base 2: mod_base = OTHER; note = 2'O-methyl guanosine phosphorothioate
  modified_base 3: mod_base = OTHER; note = 2'-fluoro uridine
  modified_base 4: mod_base = OTHER; note = 2'O-methyl cytidine
  modified_base 5: mod_base = OTHER; note = 2'-fluoro uridine
  modified_base 6: mod_base = OTHER; note = 2'O-methyl guanosine
  modified_base 7: mod_base = OTHER; note = 2'-fluoro adenosine
  modified_base 8: mod_base = OTHER; note = 2'O-methyl cytidine
  modified_base 9: mod_base = OTHER; note = 2'-fluoro uridine
  modified_base 10: mod_base = OTHER; note = 2'O-methyl uridine
  modified_base 11: mod_base = OTHER; note = 2'-fluoro uridine
  modified_base 12: mod_base = OTHER; note = 2'O-methyl cytidine
  modified_base 13: mod_base = OTHER; note = 2'-fluoro guanosine
  modified_base 14: mod_base = OTHER; note = 2'O-methyl guanosine
  modified_base 15: mod_base = OTHER; note = 2'-fluoro uridine
  modified_base 16: mod_base = OTHER; note = 2'O-methyl cytidine
  modified_base 17: mod_base = OTHER; note = 2'-fluoro cytidine
  modified_base 18: mod_base = OTHER; note = 2'O-methyl adenosine
  modified_base 19: mod_base = OTHER; note = 2'-fluoro adenosine phosphorothioate
  modified_base 20: mod_base = OTHER; note = 2'O-methyl uridine phosphorothioate
  modified_base 21: mod_base = OTHER; note = 2'O-methyl uridine
tgtctgactttcggtccaatt

SEQ ID NO: 1009 - RNA, 21 nt, synthetic construct
  source 1..21: mol_type = other RNA
  modified_base 1: mod_base = OTHER; note = 2'-fluoro guanosine phosphorothioate
  modified_base 2: mod_base = OTHER; note = 2'O-methyl uridine phosphorothioate
  modified_base 3: mod_base = OTHER; note = 2'-fluoro cytidine
  modified_base 4: mod_base = OTHER; note = 2'O-methyl uridine
  modified_base 5: mod_base = OTHER; note = 2'-fluoro guanosine
  modified_base 6: mod_base = OTHER; note = 2'O-methyl adenosine
  modified_base 7: mod_base = OTHER; note = 2'-fluoro cytidine
  modified_base 8: mod_base = OTHER; note = 2'O-methyl uridine
  modified_base 9: mod_base = OTHER; note = 2'-fluoro uridine
  modified_base 10: mod_base = OTHER; note = 2'O-methyl uridine
  modified_base 11: mod_base = OTHER; note = 2'-fluoro cytidine
  modified_base 12: mod_base = OTHER; note = 2'O-methyl guanosine
  modified_base 13: mod_base = OTHER; note = 2'-fluoro guanosine
  modified_base 14: mod_base = OTHER; note = 2'O-methyl uridine
  modified_base 15: mod_base = OTHER; note = 2'-fluoro cytidine
  modified_base 16: mod_base = OTHER; note = 2'O-methyl cytidine
  modified_base 17: mod_base = OTHER; note = 2'-fluoro adenosine
  modified_base 18: mod_base = OTHER; note = 2'O-methyl adenosine
  modified_base 19: mod_base = OTHER; note = 2'-fluoro adenosine phosphorothioate
  modified_base 20: mod_base = OTHER; note = 2'O-methyl uridine phosphorothioate
  modified_base 21: mod_base = OTHER; note = 2'O-methyl uridine
gtctgactttcggtccaaatt

SEQ ID NO: 1010 - RNA, 21 nt, synthetic construct
  source 1..21: mol_type = other RNA
  modified_base 1: mod_base = OTHER; note = 2'-fluoro guanosine phosphorothioate
  modified_base 2: mod_base = OTHER; note = 2'O-methyl guanosine phosphorothioate
  modified_base 3: mod_base = OTHER; note = 2'-fluoro uridine
  modified_base 4: mod_base = OTHER; note = 2'O-methyl cytidine
  modified_base 5: mod_base = OTHER; note = 2'-fluoro cytidine
  modified_base 6: mod_base = OTHER; note = 2'O-methyl adenosine
  modified_base 7: mod_base = OTHER; note = 2'-fluoro adenosine
  modified_base 8: mod_base = OTHER; note = 2'O-methyl adenosine
  modified_base 9: mod_base = OTHER; note = 2'-fluoro guanosine
  modified_base 10: mod_base = OTHER; note = 2'O-methyl adenosine
  modified_base 11: mod_base = OTHER; note = 2'-fluoro cytidine
  modified_base 12: mod_base = OTHER; note = 2'O-methyl guanosine
  modified_base 13: mod_base = OTHER; note = 2'-fluoro adenosine
  modified_base 14: mod_base = OTHER; note = 2'O-methyl adenosine
  modified_base 15: mod_base = OTHER; note = 2'-fluoro guanosine
  modified_base 16: mod_base = OTHER; note = 2'O-methyl uridine
  modified_base 17: mod_base = OTHER; note = 2'-fluoro cytidine
  modified_base 18: mod_base = OTHER; note = 2'O-methyl guanosine
  modified_base 19: mod_base = OTHER; note = 2'-fluoro uridine phosphorothioate
  modified_base 20: mod_base = OTHER; note = 2'O-methyl uridine phosphorothioate
  modified_base 21: mod_base = OTHER; note = 2'O-methyl uridine
ggtccaaagacgaagtcgttt

SEQ ID NO: 1011 - RNA, 21 nt, synthetic construct
  source 1..21: mol_type = other RNA
  modified_base 1: mod_base = OTHER; note = 2'-fluoro guanosine phosphorothioate
  modified_base 2: mod_base = OTHER; note = 2'O-methyl uridine phosphorothioate
  modified_base 3: mod_base = OTHER; note = 2'-fluoro cytidine
  modified_base 4: mod_base = OTHER; note = 2'O-methyl cytidine
  modified_base 5: mod_base = OTHER; note = 2'-fluoro adenosine
  modified_base 6: mod_base = OTHER; note = 2'O-methyl adenosine
  modified_base 7: mod_base = OTHER; note = 2'-fluoro adenosine
  modified_base 8: mod_base = OTHER; note = 2'O-methyl guanosine
  modified_base 9: mod_base = OTHER; note = 2'-fluoro adenosine
  modified_base 10: mod_base = OTHER; note = 2'O-methyl cytidine
  modified_base 11: mod_base = OTHER; note = 2'-fluoro guanosine
  modified_base 12: mod_base = OTHER; note = 2'O-methyl adenosine
  modified_base 13: mod_base = OTHER; note = 2'-fluoro adenosine
  modified_base 14: mod_base = OTHER; note = 2'O-methyl guanosine
  modified_base 15: mod_base = OTHER; note = 2'-fluoro uridine
  modified_base 16: mod_base = OTHER; note = 2'O-methyl cytidine
  modified_base 17: mod_base = OTHER; note = 2'-fluoro guanosine
  modified_base 18: mod_base = OTHER; note = 2'O-methyl uridine
  modified_base 19: mod_base = OTHER; note = 2'-fluoro guanosine phosphorothioate
  modified_base 20: mod_base = OTHER; note = 2'O-methyl uridine phosphorothioate
  modified_base 21: mod_base = OTHER; note = 2'O-methyl uridine
gtccaaagacgaagtcgtgtt

SEQ ID NO: 1012 - RNA, 21 nt, synthetic construct
  source 1..21: mol_type = other RNA
  modified_base 1: mod_base = OTHER; note = 2'-fluoro uridine phosphorothioate
  modified_base 2: mod_base = OTHER; note = 2'O-methyl cytidine phosphorothioate
  modified_base 3: mod_base = OTHER; note = 2'-fluoro cytidine
  modified_base 4: mod_base = OTHER; note = 2'O-methyl adenosine
  modified_base 5: mod_base = OTHER; note = 2'-fluoro adenosine
  modified_base 6: mod_base = OTHER; note = 2'O-methyl adenosine
  modified_base 7: mod_base = OTHER; note = 2'-fluoro guanosine
  modified_base 8: mod_base = OTHER; note = 2'O-methyl adenosine
  modified_base 9: mod_base = OTHER; note = 2'-fluoro cytidine
  modified_base 10: mod_base = OTHER; note = 2'O-methyl guanosine
  modified_base 11: mod_base = OTHER; note = 2'-fluoro adenosine
  modified_base 12: mod_base = OTHER; note = 2'O-methyl adenosine
  modified_base 13: mod_base = OTHER; note = 2'-fluoro guanosine
  modified_base 14: mod_base = OTHER; note = 2'O-methyl uridine
  modified_base 15: mod_base = OTHER; note = 2'-fluoro cytidine
  modified_base 16: mod_base = OTHER; note = 2'O-methyl guanosine
  modified_base 17: mod_base = OTHER; note = 2'-fluoro uridine
  modified_base 18: mod_base = OTHER; note = 2'O-methyl guanosine
  modified_base 19: mod_base = OTHER; note = 2'-fluoro guanosine phosphorothioate
  modified_base 20: mod_base = OTHER; note = 2'O-methyl uridine phosphorothioate
  modified_base 21: mod_base = OTHER; note = 2'O-methyl uridine
tccaaagacgaagtcgtggtt

SEQ ID NO: 1013 - RNA, 21 nt, synthetic construct
  source 1..21: mol_type = other RNA
  modified_base 1: mod_base = OTHER; note = 2'-fluoro cytidine phosphorothioate
  modified_base 2: mod_base = OTHER; note = 2'O-methyl cytidine phosphorothioate
  modified_base 3: mod_base = OTHER; note = 2'-fluoro adenosine
  modified_base 4: mod_base = OTHER; note = 2'O-methyl adenosine
  modified_base 5: mod_base = OTHER; note = 2'-fluoro adenosine
  modified_base 6: mod_base = OTHER; note = 2'O-methyl guanosine
  modified_base 7: mod_base = OTHER; note = 2'-fluoro adenosine
  modified_base 8: mod_base = OTHER; note = 2'O-methyl cytidine
  modified_base 9: mod_base = OTHER; note = 2'-fluoro guanosine
  modified_base 10: mod_base = OTHER; note = 2'O-methyl adenosine
  modified_base 11: mod_base = OTHER; note = 2'-fluoro adenosine
  modified_base 12: mod_base = OTHER; note = 2'O-methyl guanosine
  modified_base 13: mod_base = OTHER; note = 2'-fluoro uridine
  modified_base 14: mod_base = OTHER; note = 2'O-methyl cytidine
  modified_base 15: mod_base = OTHER; note = 2'-fluoro guanosine
  modified_base 16: mod_base = OTHER; note = 2'O-methyl uridine
  modified_base 17: mod_base = OTHER; note = 2'-fluoro guanosine
  modified_base 18: mod_base = OTHER; note = 2'O-methyl guanosine
  modified_base 19: mod_base = OTHER; note = 2'-fluoro adenosine phosphorothioate
  modified_base 20: mod_base = OTHER; note = 2'O-methyl uridine phosphorothioate
  modified_base 21: mod_base = OTHER; note = 2'O-methyl uridine
ccaaagacgaagtcgtggatt

SEQ ID NO: 1014 - RNA, 21 nt, synthetic construct
  source 1..21: mol_type = other RNA
  modified_base 1: mod_base = OTHER; note = 2'-fluoro cytidine phosphorothioate
  modified_base 2: mod_base = OTHER; note = 2'O-methyl adenosine phosphorothioate
  modified_base 3: mod_base = OTHER; note = 2'-fluoro adenosine
  modified_base 4: mod_base = OTHER; note = 2'O-methyl adenosine
  modified_base 5: mod_base = OTHER; note = 2'-fluoro guanosine
  modified_base 6: mod_base = OTHER; note = 2'O-methyl adenosine
  modified_base 7: mod_base = OTHER; note = 2'-fluoro cytidine
  modified_base 8: mod_base = OTHER; note = 2'O-methyl guanosine
  modified_base 9: mod_base = OTHER; note = 2'-fluoro adenosine
  modified_base 10: mod_base = OTHER; note = 2'O-methyl adenosine
  modified_base 11: mod_base = OTHER; note = 2'-fluoro guanosine
  modified_base 12: mod_base = OTHER; note = 2'O-methyl uridine
  modified_base 13: mod_base = OTHER; note = 2'-fluoro cytidine
  modified_base 14: mod_base = OTHER; note = 2'O-methyl guanosine
  modified_base 15: mod_base = OTHER; note = 2'-fluoro uridine
  modified_base 16: mod_base = OTHER; note = 2'O-methyl guanosine
  modified_base 17: mod_base = OTHER; note = 2'-fluoro guanosine
  modified_base 18: mod_base = OTHER; note = 2'O-methyl adenosine
  modified_base 19: mod_base = OTHER; note = 2'-fluoro uridine phosphorothioate
  modified_base 20: mod_base = OTHER; note = 2'O-methyl uridine phosphorothioate
  modified_base 21: mod_base = OTHER; note = 2'O-methyl uridine
caaagacgaagtcgtggattt

SEQ ID NO: 1015 - RNA, 21 nt, synthetic construct
  source 1..21: mol_type = other RNA
  modified_base 1: mod_base = OTHER; note = 2'-fluoro adenosine phosphorothioate
  modified_base 2: mod_base = OTHER; note = 2'O-methyl adenosine phosphorothioate
  modified_base 3: mod_base = OTHER; note = 2'-fluoro guanosine
  modified_base 4: mod_base = OTHER; note = 2'O-methyl adenosine
  modified_base 5: mod_base = OTHER; note = 2'-fluoro cytidine
  modified_base 6: mod_base = OTHER; note = 2'O-methyl guanosine
  modified_base 7: mod_base = OTHER; note = 2'-fluoro adenosine
  modified_base 8: mod_base = OTHER; note = 2'O-methyl adenosine
  modified_base 9: mod_base = OTHER; note = 2'-fluoro guanosine
  modified_base 10: mod_base = OTHER; note = 2'O-methyl uridine
  modified_base 11: mod_base = OTHER; note = 2'-fluoro cytidine
  modified_base 12: mod_base = OTHER; note = 2'O-methyl guanosine
  modified_base 13: mod_base = OTHER; note = 2'-fluoro uridine
  modified_base 14: mod_base = OTHER; note = 2'O-methyl guanosine
  modified_base 15: mod_base = OTHER; note = 2'-fluoro guanosine
  modified_base 16: mod_base = OTHER; note = 2'O-methyl adenosine
  modified_base 17: mod_base = OTHER; note = 2'-fluoro uridine
  modified_base 18: mod_base = OTHER; note = 2'O-methyl guanosine
  modified_base 19: mod_base = OTHER; note = 2'-fluoro cytidine phosphorothioate
  modified_base 20: mod_base = OTHER; note = 2'O-methyl uridine phosphorothioate
  modified_base 21: mod_base = OTHER; note = 2'O-methyl uridine
aagacgaagtcgtggatgctt

SEQ ID NO: 1016 - RNA, 21 nt, synthetic construct
  source 1..21: mol_type = other RNA
  modified_base 1: mod_base = OTHER; note = 2'-fluoro adenosine phosphorothioate
  modified_base 2: mod_base = OTHER; note = 2'O-methyl guanosine phosphorothioate
  modified_base 3: mod_base = OTHER; note = 2'-fluoro adenosine
  modified_base 4: mod_base = OTHER; note = 2'O-methyl cytidine
  modified_base 5: mod_base = OTHER; note = 2'-fluoro guanosine
  modified_base 6: mod_base = OTHER; note = 2'O-methyl adenosine
  modified_base 7: mod_base = OTHER; note = 2'-fluoro adenosine
  modified_base 8: mod_base = OTHER; note = 2'O-methyl guanosine
  modified_base 9: mod_base = OTHER; note = 2'-fluoro uridine
  modified_base 10: mod_base = OTHER; note = 2'O-methyl cytidine
  modified_base 11: mod_base = OTHER; note = 2'-fluoro guanosine
  modified_base 12: mod_base = OTHER; note = 2'O-methyl uridine
  modified_base 13: mod_base = OTHER; note = 2'-fluoro guanosine
  modified_base 14: mod_base = OTHER; note = 2'O-methyl guanosine
  modified_base 15: mod_base = OTHER; note = 2'-fluoro adenosine
  modified_base 16: mod_base = OTHER; note = 2'O-methyl uridine
  modified_base 17: mod_base = OTHER; note = 2'-fluoro guanosine
  modified_base 18: mod_base = OTHER; note = 2'O-methyl cytidine
  modified_base 19: mod_base = OTHER; note = 2'-fluoro cytidine phosphorothioate
  modified_base 20: mod_base = OTHER; note = 2'O-methyl uridine phosphorothioate
  modified_base 21: mod_base = OTHER; note = 2'O-methyl uridine
agacgaagtcgtggatgcctt

SEQ ID NO: 1017 - RNA, 21 nt, synthetic construct
  source 1..21: mol_type = other RNA
  modified_base 1: mod_base = OTHER; note = 2'-fluoro guanosine phosphorothioate
  modified_base 2: mod_base = OTHER; note = 2'O-methyl adenosine phosphorothioate
  modified_base 3: mod_base = OTHER; note = 2'-fluoro cytidine
  modified_base 4: mod_base = OTHER; note = 2'O-methyl guanosine
  modified_base 5: mod_base = OTHER; note = 2'-fluoro adenosine
  modified_base 6: mod_base = OTHER; note = 2'O-methyl adenosine
  modified_base 7: mod_base = OTHER; note = 2'-fluoro guanosine
  modified_base 8: mod_base = OTHER; note = 2'O-methyl uridine
  modified_base 9: mod_base = OTHER; note = 2'-fluoro cytidine
  modified_base 10: mod_base = OTHER; note = 2'O-methyl guanosine
  modified_base 11: mod_base = OTHER; note = 2'-fluoro uridine
  modified_base 12: mod_base = OTHER; note = 2'O-methyl guanosine
  modified_base 13: mod_base = OTHER; note = 2'-fluoro guanosine
  modified_base 14: mod_base = OTHER; note = 2'O-methyl adenosine
  modified_base 15: mod_base = OTHER; note = 2'-fluoro uridine
  modified_base 16: mod_base = OTHER; note = 2'O-methyl guanosine
  modified_base 17: mod_base = OTHER; note = 2'-fluoro cytidine
  modified_base 18: mod_base = OTHER; note = 2'O-methyl cytidine
  modified_base 19: mod_base = OTHER; note = 2'-fluoro uridine phosphorothioate
  modified_base 20: mod_base = OTHER; note = 2'O-methyl uridine phosphorothioate
  modified_base 21: mod_base = OTHER; note = 2'O-methyl uridine
gacgaagtcgtggatgccttt

SEQ ID NO: 1018 - RNA, 21 nt, synthetic construct
  source 1..21: mol_type = other RNA
  modified_base 1: mod_base = OTHER; note = 2'-fluoro adenosine phosphorothioate
  modified_base 2: mod_base = OTHER; note = 2'O-methyl cytidine phosphorothioate
  modified_base 3: mod_base = OTHER; note = 2'-fluoro guanosine
  modified_base 4: mod_base = OTHER; note = 2'O-methyl adenosine
  modified_base 5: mod_base = OTHER; note = 2'-fluoro adenosine
  modified_base 6: mod_base = OTHER; note = 2'O-methyl guanosine
  modified_base 7: mod_base = OTHER; note = 2'-fluoro uridine
  modified_base 8: mod_base = OTHER; note = 2'O-methyl cytidine
  modified_base 9: mod_base = OTHER; note = 2'-fluoro guanosine
  modified_base 10: mod_base = OTHER; note = 2'O-methyl uridine
  modified_base 11: mod_base = OTHER; note = 2'-fluoro guanosine
  modified_base 12: mod_base = OTHER; note = 2'O-methyl guanosine
  modified_base 13: mod_base = OTHER; note = 2'-fluoro adenosine
  modified_base 14: mod_base = OTHER; note = 2'O-methyl uridine
  modified_base 15: mod_base = OTHER; note = 2'-fluoro guanosine
  modified_base 16: mod_base = OTHER; note = 2'O-methyl cytidine
  modified_base 17: mod_base = OTHER; note = 2'-fluoro cytidine
  modified_base 18: mod_base = OTHER; note = 2'O-methyl uridine
  modified_base 19: mod_base = OTHER; note = 2'-fluoro uridine phosphorothioate
  modified_base 20: mod_base = OTHER; note = 2'O-methyl uridine phosphorothioate
  modified_base 21: mod_base = OTHER; note = 2'O-methyl uridine
acgaagtcgtggatgcctttt

SEQ ID NO: 1019 - RNA, 21 nt, synthetic construct
  source 1..21: mol_type = other RNA
  modified_base 1: mod_base = OTHER; note = 2'-fluoro guanosine phosphorothioate
  modified_base 2: mod_base = OTHER; note = 2'O-methyl adenosine phosphorothioate
  modified_base 3: mod_base = OTHER; note = 2'-fluoro adenosine
  modified_base 4: mod_base = OTHER; note = 2'O-methyl guanosine
  modified_base 5: mod_base = OTHER; note = 2'-fluoro uridine
  modified_base 6: mod_base = OTHER; note = 2'O-methyl cytidine
  modified_base 7: mod_base = OTHER; note = 2'-fluoro guanosine
  modified_base 8: mod_base = OTHER; note = 2'O-methyl uridine
  modified_base 9: mod_base = OTHER; note = 2'-fluoro guanosine
  modified_base 10: mod_base = OTHER; note = 2'O-methyl guanosine
  modified_base 11: mod_base = OTHER; note = 2'-fluoro adenosine
  modified_base 12: mod_base = OTHER; note = 2'O-methyl uridine
  modified_base 13: mod_base = OTHER; note = 2'-fluoro guanosine
  modified_base 14: mod_base = OTHER; note = 2'O-methyl cytidine
  modified_base 15: mod_base = OTHER; note = 2'-fluoro cytidine
  modified_base 16: mod_base = OTHER; note = 2'O-methyl uridine
  modified_base 17: mod_base = OTHER; note = 2'-fluoro uridine
  modified_base 18: mod_base = OTHER; note = 2'O-methyl guanosine
  modified_base 19: mod_base = OTHER; note = 2'-fluoro guanosine phosphorothioate
  modified_base 20: mod_base = OTHER; note = 2'O-methyl uridine phosphorothioate
  modified_base 21: mod_base = OTHER; note = 2'O-methyl uridine
gaagtcgtggatgccttggtt

SEQ ID NO: 1020 - RNA, 21 nt, synthetic construct
  source 1..21: mol_type = other RNA
  modified_base 1: mod_base = OTHER; note = 2'-fluoro adenosine phosphorothioate
  modified_base 2: mod_base = OTHER; note = 2'O-methyl adenosine phosphorothioate
  modified_base 3: mod_base = OTHER; note = 2'-fluoro guanosine
  modified_base 4: mod_base = OTHER; note = 2'O-methyl uridine
  modified_base 5: mod_base = OTHER; note = 2'-fluoro cytidine
  modified_base 6: mod_base = OTHER; note = 2'O-methyl guanosine
  modified_base 7: mod_base = OTHER; note = 2'-fluoro uridine
  modified_base 8: mod_base = OTHER; note = 2'O-methyl guanosine
  modified_base 9: mod_base = OTHER; note = 2'-fluoro guanosine
  modified_base 10: mod_base = OTHER; note = 2'O-methyl adenosine
  modified_base 11: mod_base = OTHER; note = 2'-fluoro uridine
  modified_base 12: mod_base = OTHER; note = 2'O-methyl guanosine
  modified_base 13: mod_base = OTHER; note = 2'-fluoro cytidine
  modified_base 14: mod_base = OTHER; note = 2'O-methyl cytidine
  modified_base 15: mod_base = OTHER; note = 2'-fluoro uridine
  modified_base 16: mod_base = OTHER; note = 2'O-methyl uridine
  modified_base 17: mod_base = OTHER; note = 2'-fluoro guanosine
  modified_base 18: mod_base = OTHER; note = 2'O-methyl guanosine
  modified_base 19: mod_base = OTHER; note = 2'-fluoro uridine phosphorothioate
  modified_base 20: mod_base = OTHER; note = 2'O-methyl uridine phosphorothioate
  modified_base 21: mod_base = OTHER; note = 2'O-methyl uridine
aagtcgtggatgccttggttt

SEQ ID NO: 1021 - RNA, 21 nt, synthetic construct
  source 1..21: mol_type = other RNA
  modified_base 1: mod_base = OTHER; note = 2'-fluoro guanosine phosphorothioate
  modified_base 2: mod_base = OTHER; note = 2'O-methyl uridine phosphorothioate
  modified_base 3: mod_base = OTHER; note = 2'-fluoro cytidine
  modified_base 4: mod_base = OTHER; note = 2'O-methyl guanosine
  modified_base 5: mod_base = OTHER; note = 2'-fluoro uridine
  modified_base 6: mod_base = OTHER; note = 2'O-methyl guanosine
  modified_base 7: mod_base = OTHER; note = 2'-fluoro guanosine
  modified_base 8: mod_base = OTHER; note = 2'O-methyl adenosine
  modified_base 9: mod_base = OTHER; note = 2'-fluoro uridine
  modified_base 10: mod_base = OTHER; note = 2'O-methyl guanosine
  modified_base 11: mod_base = OTHER; note = 2'-fluoro cytidine
  modified_base 12: mod_base = OTHER; note = 2'O-methyl cytidine
  modified_base 13: mod_base = OTHER; note = 2'-fluoro uridine
  modified_base 14: mod_base = OTHER; note = 2'O-methyl uridine
  modified_base 15: mod_base = OTHER; note = 2'-fluoro guanosine
  modified_base 16: mod_base = OTHER; note = 2'O-methyl guanosine
  modified_base 17: mod_base = OTHER; note = 2'-fluoro uridine
  modified_base 18: mod_base = OTHER; note = 2'O-methyl adenosine
  modified_base 19: mod_base = OTHER; note = 2'-fluoro uridine phosphorothioate
  modified_base 20: mod_base = OTHER; note = 2'O-methyl uridine phosphorothioate
  modified_base 21: mod_base = OTHER; note = 2'O-methyl uridine
gtcgtggatgccttggtattt

SEQ ID NO: 1022 - RNA, 21 nt, synthetic construct
  source 1..21: mol_type = other RNA
  modified_base 1: mod_base = OTHER; note = 2'-fluoro uridine phosphorothioate
  modified_base 2: mod_base = OTHER; note = 2'O-methyl cytidine phosphorothioate
  modified_base 3: mod_base = OTHER; note = 2'-fluoro guanosine
  modified_base 4: mod_base = OTHER; note = 2'O-methyl uridine
  modified_base 5: mod_base = OTHER; note = 2'-fluoro guanosine
  modified_base 6: mod_base = OTHER; note = 2'O-methyl guanosine
  modified_base 7: mod_base = OTHER; note = 2'-fluoro adenosine
  modified_base 8: mod_base = OTHER; note = 2'O-methyl uridine
  modified_base 9: mod_base = OTHER; note = 2'-fluoro guanosine
  modified_base 10: mod_base = OTHER; note = 2'O-methyl cytidine
  modified_base 11: mod_base = OTHER; note = 2'-fluoro cytidine
  modified_base 12: mod_base = OTHER; note = 2'O-methyl uridine
  modified_base 13: mod_base = OTHER; note = 2'-fluoro uridine
  modified_base 14: mod_base = OTHER; note = 2'O-methyl guanosine
  modified_base 15: mod_base = OTHER; note = 2'-fluoro guanosine
  modified_base 16: mod_base = OTHER; note = 2'O-methyl uridine
  modified_base 17: mod_base = OTHER; note = 2'-fluoro adenosine
  modified_base 18: mod_base = OTHER; note = 2'O-methyl uridine
  modified_base 19: mod_base = OTHER; note = 2'-fluoro guanosine phosphorothioate
  modified_base 20: mod_base = OTHER; note = 2'O-methyl uridine phosphorothioate
  modified_base 21: mod_base = OTHER; note = 2'O-methyl uridine
tcgtggatgccttggtatgtt

SEQ ID NO: 1023 - RNA, 21 nt, synthetic construct
  source 1..21: mol_type = other RNA
  modified_base 1: mod_base = OTHER; note = 2'-fluoro guanosine phosphorothioate
  modified_base 2: mod_base = OTHER; note = 2'O-methyl uridine phosphorothioate
  modified_base 3: mod_base = OTHER; note = 2'-fluoro guanosine
  modified_base 4: mod_base = OTHER; note = 2'O-methyl guanosine
  modified_base 5: mod_base = OTHER; note = 2'-fluoro adenosine
  modified_base 6: mod_base = OTHER; note = 2'O-methyl uridine
  modified_base 7: mod_base = OTHER; note = 2'-fluoro guanosine
  modified_base 8: mod_base = OTHER; note = 2'O-methyl cytidine
  modified_base 9: mod_base = OTHER; note = 2'-fluoro cytidine
  modified_base 10: mod_base = OTHER; note = 2'O-methyl uridine
  modified_base 11: mod_base = OTHER; note = 2'-fluoro uridine
  modified_base 12: mod_base = OTHER; note = 2'O-methyl guanosine
  modified_base 13: mod_base = OTHER; note = 2'-fluoro guanosine
  modified_base 14: mod_base = OTHER; note = 2'O-methyl uridine
  modified_base 15: mod_base = OTHER; note = 2'-fluoro adenosine
  modified_base 16: mod_base = OTHER; note = 2'O-methyl uridine
  modified_base 17: mod_base = OTHER; note = 2'-fluoro guanosine
  modified_base 18: mod_base = OTHER; note = 2'O-methyl uridine
  modified_base 19: mod_base = OTHER; note = 2'-fluoro uridine phosphorothioate
  modified_base 20: mod_base = OTHER; note = 2'O-methyl uridine phosphorothioate
  modified_base 21: mod_base = OTHER; note = 2'O-methyl uridine
gtggatgccttggtatgtttt

SEQ ID NO: 1024 - RNA, 21 nt, synthetic construct
  source 1..21: mol_type = other RNA
  modified_base 1: mod_base = OTHER; note = 2'-fluoro uridine phosphorothioate
  modified_base 2: mod_base = OTHER; note = 2'O-methyl guanosine phosphorothioate
  modified_base 3: mod_base = OTHER; note = 2'-fluoro guanosine
  modified_base 4: mod_base = OTHER; note = 2'O-methyl adenosine
  modified_base 5: mod_base = OTHER; note = 2'-fluoro uridine
  modified_base 6: mod_base = OTHER; note = 2'O-methyl guanosine
  modified_base 7: mod_base = OTHER; note = 2'-fluoro cytidine
  modified_base 8: mod_base = OTHER; note = 2'O-methyl cytidine
  modified_base 9: mod_base = OTHER; note = 2'-fluoro uridine
  modified_base 10: mod_base = OTHER; note = 2'O-methyl uridine
  modified_base 11: mod_base = OTHER; note = 2'-fluoro guanosine
  modified_base 12: mod_base = OTHER; note = 2'O-methyl guanosine
  modified_base 13: mod_base = OTHER; note = 2'-fluoro uridine
  modified_base 14: mod_base = OTHER; note = 2'O-methyl adenosine
  modified_base 15: mod_base = OTHER; note = 2'-fluoro uridine
  modified_base 16: mod_base = OTHER; note = 2'O-methyl guanosine
  modified_base 17: mod_base = OTHER; note = 2'-fluoro uridine
  modified_base 18: mod_base = OTHER; note = 2'O-methyl uridine
  modified_base 19: mod_base = OTHER; note = 2'-fluoro cytidine phosphorothioate
  modified_base 20: mod_base = OTHER; note = 2'O-methyl uridine phosphorothioate
  modified_base 21: mod_base = OTHER; note = 2'O-methyl uridine
tggatgccttggtatgttctt

SEQ ID NO: 1025 - RNA, 21 nt, synthetic construct
  source 1..21: mol_type = other RNA
  modified_base 1: mod_base = OTHER; note = 2'-fluoro guanosine phosphorothioate
  modified_base 2: mod_base = OTHER; note = 2'O-methyl guanosine phosphorothioate
  modified_base 3: mod_base = OTHER; note = 2'-fluoro adenosine
  modified_base 4: mod_base = OTHER; note = 2'O-methyl uridine
  modified_base 5: mod_base = OTHER; note = 2'-fluoro guanosine
  modified_base 6: mod_base = OTHER; note = 2'O-methyl cytidine
  modified_base 7: mod_base = OTHER; note = 2'-fluoro cytidine
  modified_base 8: mod_base = OTHER; note = 2'O-methyl uridine
  modified_base 9: mod_base = OTHER; note = 2'-fluoro uridine
  modified_base 10: mod_base = OTHER; note = 2'O-methyl guanosine
  modified_base 11: mod_base = OTHER; note = 2'-fluoro guanosine
  modified_base 12: mod_base = OTHER; note = 2'O-methyl uridine
  modified_base 13: mod_base = OTHER; note = 2'-fluoro adenosine
  modified_base 14: mod_base = OTHER; note = 2'O-methyl uridine
  modified_base 15: mod_base = OTHER; note = 2'-fluoro guanosine
  modified_base 16: mod_base = OTHER; note = 2'O-methyl uridine
  modified_base 17: mod_base = OTHER; note = 2'-fluoro uridine
  modified_base 18: mod_base = OTHER; note = 2'O-methyl cytidine
  modified_base 19: mod_base = OTHER; note = 2'-fluoro cytidine phosphorothioate
  modified_base 20: mod_base = OTHER; note = 2'O-methyl uridine phosphorothioate
  modified_base 21: mod_base = OTHER; note = 2'O-methyl uridine
ggatgccttggtatgttcctt

SEQ ID NO: 1026 - RNA, 21 nt, synthetic construct
  source 1..21: mol_type = other RNA
  modified_base 1: mod_base = OTHER; note = 2'-fluoro adenosine phosphorothioate
  modified_base 2: mod_base = OTHER; note = 2'O-methyl uridine phosphorothioate
  modified_base 3: mod_base = OTHER; note = 2'-fluoro guanosine
  modified_base 4: mod_base = OTHER; note = 2'O-methyl cytidine
  modified_base 5: mod_base = OTHER; note = 2'-fluoro cytidine
  modified_base 6: mod_base = OTHER; note = 2'O-methyl uridine
  modified_base 7: mod_base = OTHER; note = 2'-fluoro uridine
  modified_base 8: mod_base = OTHER; note = 2'O-methyl guanosine
  modified_base 9: mod_base = OTHER; note = 2'-fluoro guanosine
  modified_base 10: mod_base = OTHER; note = 2'O-methyl uridine
  modified_base 11: mod_base = OTHER; note = 2'-fluoro adenosine
  modified_base 12: mod_base = OTHER; note = 2'O-methyl uridine
  modified_base 13: mod_base = OTHER; note = 2'-fluoro guanosine
  modified_base 14: mod_base = OTHER; note = 2'O-methyl uridine
  modified_base 15: mod_base = OTHER; note = 2'-fluoro uridine
  modified_base 16: mod_base = OTHER; note = 2'O-methyl cytidine
  modified_base 17: mod_base = OTHER; note = 2'-fluoro cytidine
  modified_base 18: mod_base = OTHER; note = 2'O-methyl uridine
  modified_base 19: mod_base = OTHER; note = 2'-fluoro guanosine phosphorothioate
  modified_base 20: mod_base = OTHER; note = 2'O-methyl uridine phosphorothioate
  modified_base 21: mod_base = OTHER; note = 2'O-methyl uridine
atgccttggtatgttcctgtt

SEQ ID NO: 1027 - RNA, 21 nt, synthetic construct
  source 1..21: mol_type = other RNA
  modified_base 1: mod_base = OTHER; note = 2'-fluoro guanosine phosphorothioate
  modified_base 2: mod_base = OTHER; note = 2'O-methyl cytidine phosphorothioate
  modified_base 3: mod_base = OTHER; note = 2'-fluoro cytidine
  modified_base 4: mod_base = OTHER; note = 2'O-methyl uridine
  modified_base 5: mod_base = OTHER; note = 2'-fluoro uridine
  modified_base 6: mod_base = OTHER; note = 2'O-methyl guanosine
  modified_base 7: mod_base = OTHER; note = 2'-fluoro guanosine
  modified_base 8: mod_base = OTHER; note = 2'O-methyl uridine
  modified_base 9: mod_base = OTHER; note = 2'-fluoro adenosine
  modified_base 10: mod_base = OTHER; note = 2'O-methyl uridine
  modified_base 11: mod_base = OTHER; note = 2'-fluoro guanosine
  modified_base 12: mod_base = OTHER; note = 2'O-methyl uridine
  modified_base 13: mod_base = OTHER; note = 2'-fluoro uridine
  modified_base 14: mod_base = OTHER; note = 2'O-methyl cytidine
  modified_base 15: mod_base = OTHER; note = 2'-fluoro cytidine
  modified_base 16: mod_base = OTHER; note = 2'O-methyl uridine
  modified_base 17: mod_base = OTHER; note = 2'-fluoro guanosine
  modified_base 18: mod_base = OTHER; note = 2'O-methyl cytidine
  modified_base 19: mod_base = OTHER; note = 2'-fluoro uridine phosphorothioate
  modified_base 20: mod_base = OTHER; note = 2'O-methyl uridine phosphorothioate
  modified_base 21: mod_base = OTHER; note = 2'O-methyl uridine
gccttggtatgttcctgcttt

SEQ ID NO: 1028 - RNA, 21 nt, synthetic construct
  source 1..21: mol_type = other RNA
  modified_base 1: mod_base = OTHER; note = 2'-fluoro adenosine phosphorothioate
  modified_base 2: mod_base = OTHER; note = 2'O-methyl uridine phosphorothioate
  modified_base 3: mod_base = OTHER; note = 2'-fluoro guanosine
  modified_base 4: mod_base = OTHER; note = 2'O-methyl uridine
  modified_base 5: mod_base = OTHER; note = 2'-fluoro uridine
  modified_base 6: mod_base = OTHER; note = 2'O-methyl cytidine
  modified_base 7: mod_base = OTHER; note = 2'-fluoro cytidine
  modified_base 8: mod_base = OTHER; note = 2'O-methyl uridine
  modified_base 9: mod_base = OTHER; note = 2'-fluoro guanosine
  modified_base 10: mod_base = OTHER; note = 2'O-methyl cytidine
  modified_base 11: mod_base = OTHER; note = 2'-fluoro uridine
  modified_base 12: mod_base = OTHER; note = 2'O-methyl uridine
  modified_base 13: mod_base = OTHER; note = 2'-fluoro cytidine
  modified_base 14: mod_base = OTHER; note = 2'O-methyl adenosine
  modified_base 15: mod_base = OTHER; note = 2'-fluoro uridine
  modified_base 16: mod_base = OTHER; note = 2'O-methyl guanosine
  modified_base 17: mod_base = OTHER; note = 2'-fluoro cytidine
  modified_base 18: mod_base = OTHER; note = 2'O-methyl cytidine
  modified_base 19: mod_base = OTHER; note = 2'-fluoro cytidine phosphorothioate
  modified_base 20: mod_base = OTHER; note = 2'O-methyl uridine phosphorothioate
  modified_base 21: mod_base = OTHER; note = 2'O-methyl uridine
atgttcctgcttcatgccctt

SEQ ID NO: 1029 - RNA, 21 nt, synthetic construct
  source 1..21: mol_type = other RNA
  modified_base 1: mod_base = OTHER; note = 2'-fluoro uridine phosphorothioate
  modified_base 2: mod_base = OTHER; note = 2'O-methyl uridine phosphorothioate
  modified_base 3: mod_base = OTHER; note = 2'-fluoro cytidine
  modified_base 4: mod_base = OTHER; note = 2'O-methyl cytidine
  modified_base 5: mod_base = OTHER; note = 2'-fluoro uridine
  modified_base 6: mod_base = OTHER; note = 2'O-methyl guanosine
  modified_base 7: mod_base = OTHER; note = 2'-fluoro cytidine
  modified_base 8: mod_base = OTHER; note = 2'O-methyl uridine
  modified_base 9: mod_base = OTHER; note = 2'-fluoro uridine
  modified_base 10: mod_base = OTHER; note = 2'O-methyl cytidine
  modified_base 11: mod_base = OTHER; note = 2'-fluoro adenosine
  modified_base 12: mod_base = OTHER; note = 2'O-methyl uridine
  modified_base 13: mod_base = OTHER; note = 2'-fluoro guanosine
  modified_base 14: mod_base = OTHER; note = 2'O-methyl cytidine
  modified_base 15: mod_base = OTHER; note = 2'-fluoro cytidine
  modified_base 16: mod_base = OTHER; note = 2'O-methyl cytidine
  modified_base 17: mod_base = OTHER; note = 2'-fluoro uridine
  modified_base 18: mod_base = OTHER; note = 2'O-methyl uridine
  modified_base 19: mod_base = OTHER; note = 2'-fluoro cytidine phosphorothioate
  modified_base 20: mod_base = OTHER; note = 2'O-methyl uridine phosphorothioate
  modified_base 21: mod_base = OTHER; note = 2'O-methyl uridine
ttcctgcttcatgcccttctt

SEQ ID NO: 1030 - RNA, 21 nt, synthetic construct
  source 1..21: mol_type = other RNA
  modified_base 1: mod_base = OTHER; note = 2'-fluoro uridine phosphorothioate
  modified_base 2: mod_base = OTHER; note = 2'O-methyl cytidine phosphorothioate
  modified_base 3: mod_base = OTHER; note = 2'-fluoro cytidine
  modified_base 4: mod_base = OTHER; note = 2'O-methyl uridine
  modified_base 5: mod_base = OTHER; note = 2'-fluoro guanosine
  modified_base 6: mod_base = OTHER; note = 2'O-methyl cytidine
  modified_base 7: mod_base = OTHER; note = 2'-fluoro uridine
  modified_base 8: mod_base = OTHER; note = 2'O-methyl uridine
  modified_base 9: mod_base = OTHER; note = 2'-fluoro cytidine
  modified_base 10: mod_base = OTHER; note = 2'O-methyl adenosine
  modified_base 11: mod_base = OTHER; note = 2'-fluoro uridine
  modified_base 12: mod_base = OTHER; note = 2'O-methyl guanosine
  modified_base 13: mod_base = OTHER; note = 2'-fluoro cytidine
  modified_base 14: mod_base = OTHER; note = 2'O-methyl cytidine
  modified_base 15: mod_base = OTHER; note = 2'-fluoro cytidine
  modified_base 16: mod_base = OTHER; note = 2'O-methyl uridine
  modified_base 17: mod_base = OTHER; note = 2'-fluoro uridine
  modified_base 18: mod_base = OTHER; note = 2'O-methyl cytidine
  modified_base 19: mod_base = OTHER; note = 2'-fluoro uridine phosphorothioate
  modified_base 20: mod_base = OTHER; note = 2'O-methyl uridine phosphorothioate
  modified_base 21: mod_base = OTHER; note = 2'O-methyl uridine
tcctgcttcatgcccttcttt

SEQ ID NO: 1031 - RNA, 21 nt, synthetic construct
  source 1..21: mol_type = other RNA
  modified_base 1: mod_base = OTHER; note = 2'-fluoro uridine phosphorothioate
  modified_base 2: mod_base = OTHER; note = 2'O-methyl guanosine phosphorothioate
  modified_base 3: mod_base = OTHER; note = 2'-fluoro guanosine
  modified_base 4: mod_base = OTHER; note = 2'O-methyl cytidine
  modified_base 5: mod_base = OTHER; note = 2'-fluoro cytidine
  modified_base 6: mod_base = OTHER; note = 2'O-methyl uridine
  modified_base 7: mod_base = OTHER; note = 2'-fluoro uridine
  modified_base 8: mod_base = OTHER; note = 2'O-methyl adenosine
  modified_base 9: mod_base = OTHER; note = 2'-fluoro uridine
  modified_base 10: mod_base = OTHER; note = 2'O-methyl cytidine
  modified_base 11: mod_base = OTHER; note = 2'-fluoro cytidine
  modified_base 12: mod_base = OTHER; note = 2'O-methyl cytidine
  modified_base 13: mod_base = OTHER; note = 2'-fluoro uridine
  modified_base 14: mod_base = OTHER; note = 2'O-methyl cytidine
  modified_base 15: mod_base = OTHER; note = 2'-fluoro cytidine
  modified_base 16: mod_base = OTHER; note = 2'O-methyl uridine
  modified_base 17: mod_base = OTHER; note = 2'-fluoro uridine
  modified_base 18: mod_base = OTHER; note = 2'O-methyl cytidine
  modified_base 19: mod_base = OTHER; note = 2'-fluoro cytidine phosphorothioate
  modified_base 20: mod_base = OTHER; note = 2'O-methyl uridine phosphorothioate
  modified_base 21: mod_base = OTHER; note = 2'O-methyl uridine
tggccttatccctccttcctt

SEQ ID NO: 1032 - RNA, 21 nt, synthetic construct
  source 1..21: mol_type = other RNA
  modified_base 1: mod_base = OTHER; note = 2'-fluoro uridine phosphorothioate
  modified_base 2: mod_base = OTHER; note = 2'O-methyl uridine phosphorothioate
  modified_base 3: mod_base = OTHER; note = 2'-fluoro adenosine
  modified_base 4: mod_base = OTHER; note = 2'O-methyl uridine
  modified_base 5: mod_base = OTHER; note = 2'-fluoro cytidine
  modified_base 6: mod_base = OTHER; note = 2'O-methyl cytidine
  modified_base 7: mod_base = OTHER; note = 2'-fluoro cytidine
  modified_base 8: mod_base = OTHER; note = 2'O-methyl uridine
  modified_base 9: mod_base = OTHER; note = 2'-fluoro cytidine
  modified_base 10: mod_base = OTHER; note = 2'O-methyl cytidine
  modified_base 11: mod_base = OTHER; note = 2'-fluoro uridine
  modified_base 12: mod_base = OTHER; note = 2'O-methyl uridine
  modified_base 13: mod_base = OTHER; note = 2'-fluoro cytidine
  modified_base 14: mod_base = OTHER; note = 2'O-methyl cytidine
  modified_base 15: mod_base = OTHER; note = 2'-fluoro uridine
  modified_base 16: mod_base = OTHER; note = 2'O-methyl uridine
  modified_base 17: mod_base = OTHER; note = 2'-fluoro cytidine
  modified_base 18: mod_base = OTHER; note = 2'O-methyl adenosine
  modified_base 19: mod_base = OTHER; note = 2'-fluoro guanosine phosphorothioate
  modified_base 20: mod_base = OTHER; note = 2'O-methyl uridine phosphorothioate
  modified_base 21: mod_base = OTHER; note = 2'O-methyl uridine
ttatccctccttccttcagtt

SEQ ID NO: 1033 - RNA, 21 nt, synthetic construct
  source 1..21: mol_type = other RNA
  modified_base 1: mod_base = OTHER; note = 2'-fluoro uridine phosphorothioate
  modified_base 2: mod_base = OTHER; note = 2'O-methyl adenosine phosphorothioate
  modified_base 3: mod_base = OTHER; note = 2'-fluoro uridine
  modified_base 4: mod_base = OTHER; note = 2'O-methyl cytidine
  modified_base 5: mod_base = OTHER; note = 2'-fluoro cytidine
  modified_base 6: mod_base = OTHER; note = 2'O-methyl cytidine
  modified_base 7: mod_base = OTHER; note = 2'-fluoro uridine
  modified_base 8: mod_base = OTHER; note = 2'O-methyl cytidine
  modified_base 9: mod_base = OTHER; note = 2'-fluoro cytidine
  modified_base 10: mod_base = OTHER; note = 2'O-methyl uridine
  modified_base 11: mod_base = OTHER; note = 2'-fluoro uridine
  modified_base 12: mod_base = OTHER; note = 2'O-methyl cytidine
  modified_base 13: mod_base = OTHER; note = 2'-fluoro cytidine
  modified_base 14: mod_base = OTHER; note = 2'O-methyl uridine
  modified_base 15: mod_base = OTHER; note = 2'-fluoro uridine
  modified_base 16: mod_base = OTHER; note = 2'O-methyl cytidine
  modified_base 17: mod_base = OTHER; note = 2'-fluoro adenosine
  modified_base 18: mod_base = OTHER; note = 2'O-methyl guanosine
  modified_base 19: mod_base = OTHER; note = 2'-fluoro adenosine phosphorothioate
  modified_base 20: mod_base = OTHER; note = 2'O-methyl uridine phosphorothioate
  modified_base 21: mod_base = OTHER; note = 2'O-methyl uridine
tatccctccttccttcagatt

SEQ ID NO: 1034 - RNA, 21 nt, synthetic construct
  source 1..21: mol_type = other RNA
  modified_base 1: mod_base = OTHER; note = 2'-fluoro cytidine phosphorothioate
  modified_base 2: mod_base = OTHER; note = 2'O-methyl cytidine phosphorothioate
  modified_base 3: mod_base = OTHER; note = 2'-fluoro uridine
  modified_base 4: mod_base = OTHER; note = 2'O-methyl cytidine
  modified_base 5: mod_base = OTHER; note = 2'-fluoro cytidine
  modified_base 6: mod_base = OTHER; note = 2'O-methyl uridine
  modified_base 7: mod_base = OTHER; note = 2'-fluoro uridine
  modified_base 8: mod_base = OTHER; note = 2'O-methyl cytidine
  modified_base 9: mod_base = OTHER; note = 2'-fluoro cytidine
  modified_base 10: mod_base = OTHER; note = 2'O-methyl uridine
  modified_base 11: mod_base = OTHER; note = 2'-fluoro uridine
  modified_base 12: mod_base = OTHER; note = 2'O-methyl cytidine
  modified_base 13: mod_base = OTHER; note = 2'-fluoro adenosine
  modified_base 14: mod_base = OTHER; note = 2'O-methyl guanosine
  modified_base 15: mod_base = OTHER; note = 2'-fluoro adenosine
  modified_base 16: mod_base = OTHER; note = 2'O-methyl guanosine
  modified_base 17: mod_base = OTHER; note = 2'-fluoro guanosine
  modified_base 18: mod_base = OTHER; note = 2'O-methyl cytidine
  modified_base 19: mod_base = OTHER; note = 2'-fluoro guanosine phosphorothioate
  modified_base 20: mod_base = OTHER; note = 2'O-methyl uridine phosphorothioate
  modified_base 21: mod_base = OTHER; note = 2'O-methyl uridine
cctccttccttcagaggcgtt

SEQ ID NO: 1035 - RNA, 21 nt, synthetic construct
  source 1..21: mol_type = other RNA
  modified_base 1: mod_base = OTHER; note = 2'-fluoro cytidine phosphorothioate
  modified_base 2: mod_base = OTHER; note = 2'O-methyl uridine phosphorothioate
  modified_base 3: mod_base = OTHER; note = 2'-fluoro cytidine
  modified_base 4: mod_base = OTHER; note = 2'O-methyl cytidine
  modified_base 5: mod_base = OTHER; note = 2'-fluoro uridine
  modified_base 6: mod_base = OTHER; note = 2'O-methyl uridine
  modified_base 7: mod_base = OTHER; note = 2'-fluoro cytidine
  modified_base 8: mod_base = OTHER; note = 2'O-methyl cytidine
  modified_base 9: mod_base = OTHER; note = 2'-fluoro uridine
  modified_base 10: mod_base = OTHER; note = 2'O-methyl uridine
  modified_base 11: mod_base = OTHER; note = 2'-fluoro cytidine
  modified_base 12: mod_base = OTHER; note = 2'O-methyl adenosine
  modified_base 13: mod_base = OTHER; note = 2'-fluoro guanosine
  modified_base 14: mod_base = OTHER; note = 2'O-methyl adenosine
  modified_base 15: mod_base = OTHER; note = 2'-fluoro guanosine
  modified_base 16: mod_base = OTHER; note = 2'O-methyl guanosine
  modified_base 17: mod_base = OTHER; note = 2'-fluoro cytidine
  modified_base 18: mod_base = OTHER; note = 2'O-methyl guanosine
  modified_base 19: mod_base = OTHER; note = 2'-fluoro uridine phosphorothioate
  modified_base 20: mod_base = OTHER; note = 2'O-methyl uridine phosphorothioate
  modified_base 21: mod_base = OTHER; note = 2'O-methyl uridine
ctccttccttcagaggcgttt

SEQ ID NO: 1036 - RNA, 21 nt, synthetic construct
  source 1..21: mol_type = other RNA
  modified_base 1: mod_base = OTHER; note = 2'-fluoro cytidine phosphorothioate
  modified_base 2: mod_base = OTHER; note = 2'O-methyl cytidine phosphorothioate
  modified_base 3: mod_base = OTHER; note = 2'-fluoro uridine
  modified_base 4: mod_base = OTHER; note = 2'O-methyl uridine
  modified_base 5: mod_base = OTHER; note = 2'-fluoro cytidine
  modified_base 6: mod_base = OTHER; note = 2'O-methyl cytidine
  modified_base 7: mod_base = OTHER; note = 2'-fluoro uridine
  modified_base 8: mod_base = OTHER; note = 2'O-methyl uridine
  modified_base 9: mod_base = OTHER; note = 2'-fluoro cytidine
  modified_base 10: mod_base = OTHER; note = 2'O-methyl adenosine
  modified_base 11: mod_base = OTHER; note = 2'-fluoro guanosine
  modified_base 12: mod_base = OTHER; note = 2'O-methyl adenosine
  modified_base 13: mod_base = OTHER; note = 2'-fluoro guanosine
  modified_base 14: mod_base = OTHER; note = 2'O-methyl guanosine
  modified_base 15: mod_base = OTHER; note = 2'-fluoro cytidine
  modified_base 16: mod_base = OTHER; note = 2'O-methyl guanosine
  modified_base 17: mod_base = OTHER; note = 2'-fluoro uridine
  modified_base 18: mod_base = OTHER; note = 2'O-methyl guanosine
  modified_base 19: mod_base = OTHER; note = 2'-fluoro cytidine phosphorothioate
  modified_base 20: mod_base = OTHER; note = 2'O-methyl uridine phosphorothioate
  modified_base 21: mod_base = OTHER; note = 2'O-methyl uridine
ccttccttcagaggcgtgctt

SEQ ID NO: 1037 - RNA, 21 nt, synthetic construct
  source 1..21: mol_type = other RNA
  modified_base 1: mod_base = OTHER; note = 2'-fluoro cytidine phosphorothioate
  modified_base 2: mod_base = OTHER; note = 2'O-methyl uridine phosphorothioate
  modified_base 3: mod_base = OTHER; note = 2'-fluoro uridine
  modified_base 4: mod_base = OTHER; note = 2'O-methyl cytidine
  modified_base 5: mod_base = OTHER; note = 2'-fluoro cytidine
  modified_base 6: mod_base = OTHER; note = 2'O-methyl uridine
  modified_base 7: mod_base = OTHER; note = 2'-fluoro uridine
  modified_base 8: mod_base = OTHER; note = 2'O-methyl cytidine
  modified_base 9: mod_base = OTHER; note = 2'-fluoro adenosine
  modified_base 10: mod_base = OTHER; note = 2'O-methyl guanosine
  modified_base 11: mod_base = OTHER; note = 2'-fluoro adenosine
  modified_base 12: mod_base = OTHER; note = 2'O-methyl guanosine
  modified_base 13: mod_base = OTHER; note = 2'-fluoro guanosine
  modified_base 14: mod_base = OTHER; note = 2'O-methyl cytidine
  modified_base 15: mod_base = OTHER; note = 2'-fluoro guanosine
  modified_base 16: mod_base = OTHER; note = 2'O-methyl uridine
  modified_base 17: mod_base = OTHER; note = 2'-fluoro guanosine
  modified_base 18: mod_base = OTHER; note = 2'O-methyl cytidine
  modified_base 19: mod_base = OTHER; note = 2'-fluoro guanosine phosphorothioate
  modified_base 20: mod_base = OTHER; note = 2'O-methyl uridine phosphorothioate
  modified_base 21: mod_base = OTHER; note = 2'O-methyl uridine
cttccttcagaggcgtgcgtt

SEQ ID NO: 1038 - RNA, 21 nt, synthetic construct
  source 1..21: mol_type = other RNA
  modified_base 1: mod_base = OTHER; note = 2'-fluoro uridine phosphorothioate
  modified_base 2: mod_base = OTHER; note = 2'O-methyl uridine phosphorothioate
  modified_base 3: mod_base = OTHER; note = 2'-fluoro cytidine
  modified_base 4: mod_base = OTHER; note = 2'O-methyl cytidine
  modified_base 5: mod_base = OTHER; note = 2'-fluoro uridine
  modified_base 6: mod_base = OTHER; note = 2'O-methyl uridine
  modified_base 7: mod_base = OTHER; note = 2'-fluoro cytidine
  modified_base 8: mod_base = OTHER; note = 2'O-methyl adenosine
  modified_base 9: mod_base = OTHER; note = 2'-fluoro guanosine
  modified_base 10: mod_base = OTHER; note = 2'O-methyl adenosine
  modified_base 11: mod_base = OTHER; note = 2'-fluoro guanosine
  modified_base 12: mod_base = OTHER; note = 2'O-methyl guanosine
  modified_base 13: mod_base = OTHER; note = 2'-fluoro cytidine
  modified_base 14: mod_base = OTHER; note = 2'O-methyl guanosine
  modified_base 15: mod_base = OTHER; note = 2'-fluoro uridine
  modified_base 16: mod_base = OTHER; note = 2'O-methyl guanosine
  modified_base 17: mod_base = OTHER; note = 2'-fluoro cytidine
  modified_base 18: mod_base = OTHER; note = 2'O-methyl guanosine
  modified_base 19: mod_base = OTHER; note = 2'-fluoro adenosine phosphorothioate
  modified_base 20: mod_base = OTHER; note = 2'O-methyl uridine phosphorothioate
  modified_base 21: mod_base = OTHER; note = 2'O-methyl uridine
ttccttcagaggcgtgcgatt

SEQ ID NO: 1039 - RNA, 21 nt, synthetic construct
  source 1..21: mol_type = other RNA
  modified_base 1: mod_base = OTHER; note = 2'-fluoro uridine phosphorothioate
  modified_base 2: mod_base = OTHER; note = 2'O-methyl cytidine phosphorothioate
  modified_base 3: mod_base = OTHER; note = 2'-fluoro cytidine
  modified_base 4: mod_base = OTHER; note = 2'O-methyl uridine
  modified_base 5: mod_base = OTHER; note = 2'-fluoro uridine
  modified_base 6: mod_base = OTHER; note = 2'O-methyl cytidine
  modified_base 7: mod_base = OTHER; note = 2'-fluoro adenosine
  modified_base 8: mod_base = OTHER; note = 2'O-methyl guanosine
  modified_base 9: mod_base = OTHER; note = 2'-fluoro adenosine
  modified_base 10: mod_base = OTHER; note = 2'O-methyl guanosine
  modified_base 11: mod_base = OTHER; note = 2'-fluoro guanosine
  modified_base 12: mod_base = OTHER; note = 2'O-methyl cytidine
  modified_base 13: mod_base = OTHER; note = 2'-fluoro guanosine
  modified_base 14: mod_base = OTHER; note = 2'O-methyl uridine
  modified_base 15: mod_base = OTHER; note = 2'-fluoro guanosine
  modified_base 16: mod_base = OTHER; note = 2'O-methyl cytidine
  modified_base 17: mod_base = OTHER; note = 2'-fluoro guanosine
  modified_base 18: mod_base = OTHER; note = 2'O-methyl adenosine
  modified_base 19: mod_base = OTHER; note = 2'-fluoro uridine phosphorothioate
  modified_base 20: mod_base = OTHER; note = 2'O-methyl uridine phosphorothioate
  modified_base 21: mod_base = OTHER; note = 2'O-methyl uridine
tccttcagaggcgtgcgattt

SEQ ID NO: 1040 - RNA, 21 nt, synthetic construct
  source 1..21: mol_type = other RNA
  modified_base 1: mod_base = OTHER; note = 2'-fluoro cytidine phosphorothioate
  modified_base 2: mod_base = OTHER; note = 2'O-methyl cytidine phosphorothioate
  modified_base 3: mod_base = OTHER; note = 2'-fluoro uridine
  modified_base 4: mod_base = OTHER; note = 2'O-methyl uridine
  modified_base 5: mod_base = OTHER; note = 2'-fluoro cytidine
  modified_base 6: mod_base = OTHER; note = 2'O-methyl adenosine
  modified_base 7: mod_base = OTHER; note = 2'-fluoro guanosine
  modified_base 8: mod_base = OTHER; note = 2'O-methyl adenosine
  modified_base 9: mod_base = OTHER; note = 2'-fluoro guanosine
  modified_base 10: mod_base = OTHER; note = 2'O-methyl guanosine
  modified_base 11: mod_base = OTHER; note = 2'-fluoro cytidine
  modified_base 12: mod_base = OTHER; note = 2'O-methyl guanosine
  modified_base 13: mod_base = OTHER; note = 2'-fluoro uridine
  modified_base 14: mod_base = OTHER; note = 2'O-methyl guanosine
  modified_base 15: mod_base = OTHER; note = 2'-fluoro cytidine
  modified_base 16: mod_base = OTHER; note = 2'O-methyl guanosine
  modified_base 17: mod_base = OTHER; note = 2'-fluoro adenosine
  modified_base 18: mod_base = OTHER; note = 2'O-methyl uridine
  modified_base 19: mod_base = OTHER; note = 2'-fluoro adenosine phosphorothioate
  modified_base 20: mod_base = OTHER; note = 2'O-methyl uridine phosphorothioate
  modified_base 21: mod_base = OTHER; note = 2'O-methyl uridine
ccttcagaggcgtgcgatatt

SEQ ID NO: 1041 - RNA, 21 nt, synthetic construct
  source 1..21: mol_type = other RNA
  modified_base 1: mod_base = OTHER; note = 2'-fluoro adenosine phosphorothioate
  modified_base 2: mod_base = OTHER; note = 2'O-methyl uridine phosphorothioate
  modified_base 3: mod_base = OTHER; note = 2'-fluoro adenosine
  modified_base 4: mod_base = OTHER; note = 2'O-methyl uridine
  modified_base 5: mod_base = OTHER; note = 2'-fluoro guanosine
  modified_base 6: mod_base = OTHER; note = 2'O-methyl uridine
  modified_base 7: mod_base = OTHER; note = 2'-fluoro guanosine
  modified_base 8: mod_base = OTHER; note = 2'O-methyl guanosine
  modified_base 9: mod_base = OTHER; note = 2'-fluoro adenosine
  modified_base 10: mod_base = OTHER; note = 2'O-methyl uridine
  modified_base 11: mod_base = OTHER; note = 2'-fluoro guanosine
  modified_base 12: mod_base = OTHER; note = 2'O-methyl guanosine
  modified_base 13: mod_base = OTHER; note = 2'-fluoro adenosine
  modified_base 14: mod_base = OTHER; note = 2'O-methyl guanosine
  modified_base 15: mod_base = OTHER; note = 2'-fluoro guanosine
  modified_base 16: mod_base = OTHER; note = 2'O-methyl adenosine
  modified_base 17: mod_base = OTHER; note = 2'-fluoro guanosine
  modified_base 18: mod_base = OTHER; note = 2'O-methyl uridine
  modified_base 19: mod_base = OTHER; note = 2'-fluoro guanosine phosphorothioate
  modified_base 20: mod_base = OTHER; note = 2'O-methyl uridine phosphorothioate
  modified_base 21: mod_base = OTHER; note = 2'O-methyl uridine
atatgtggatggaggagtgtt

SEQ ID NO: 1042 - RNA, 21 nt, synthetic construct
  source 1..21: mol_type = other RNA
  modified_base 1: mod_base = OTHER; note = 2'-fluoro uridine phosphorothioate
  modified_base 2: mod_base = OTHER; note = 2'O-methyl guanosine phosphorothioate
  modified_base 3: mod_base = OTHER; note = 2'-fluoro guanosine
  modified_base 4: mod_base = OTHER; note = 2'O-methyl adenosine
  modified_base 5: mod_base = OTHER; note = 2'-fluoro uridine
  modified_base 6: mod_base = OTHER; note = 2'O-methyl guanosine
  modified_base 7: mod_base = OTHER; note = 2'-fluoro guanosine
  modified_base 8: mod_base = OTHER; note = 2'O-methyl adenosine
  modified_base 9: mod_base = OTHER; note = 2'-fluoro guanosine
  modified_base 10: mod_base = OTHER; note = 2'O-methyl guanosine
  modified_base 11: mod_base = OTHER; note = 2'-fluoro adenosine
  modified_base 12: mod_base = OTHER; note = 2'O-methyl guanosine
  modified_base 13: mod_base = OTHER; note = 2'-fluoro uridine
  modified_base 14: mod_base = OTHER; note = 2'O-methyl guanosine
  modified_base 15: mod_base = OTHER; note = 2'-fluoro adenosine
  modified_base 16: mod_base = OTHER; note = 2'O-methyl guanosine
  modified_base 17: mod_base = OTHER; note = 2'-fluoro uridine
  modified_base 18: mod_base = OTHER; note = 2'O-methyl guanosine
  modified_base 19: mod_base = OTHER; note = 2'-fluoro adenosine phosphorothioate
  modified_base 20: mod_base = OTHER; note = 2'O-methyl uridine phosphorothioate
  modified_base 21: mod_base = OTHER; note = 2'O-methyl uridine
tggatggaggagtgagtgatt

SEQ ID NO: 1043 - RNA, 21 nt, synthetic construct
  source 1..21: mol_type = other RNA
  modified_base 1: mod_base = OTHER; note = 2'-fluoro adenosine phosphorothioate
  modified_base 2: mod_base = OTHER; note = 2'O-methyl uridine phosphorothioate
  modified_base 3: mod_base = OTHER; note = 2'-fluoro guanosine
  modified_base 4: mod_base = OTHER; note = 2'O-methyl guanosine
  modified_base 5: mod_base = OTHER; note = 2'-fluoro adenosine
  modified_base 6: mod_base = OTHER; note = 2'O-methyl guanosine
  modified_base 7: mod_base = OTHER; note = 2'-fluoro guanosine
  modified_base 8: mod_base = OTHER; note = 2'O-methyl adenosine
  modified_base 9: mod_base = OTHER; note = 2'-fluoro guanosine
  modified_base 10: mod_base = OTHER; note = 2'O-methyl uridine
  modified_base 11: mod_base = OTHER; note = 2'-fluoro guanosine
  modified_base 12: mod_base = OTHER; note = 2'O-methyl adenosine
  modified_base 13: mod_base = OTHER; note = 2'-fluoro guanosine
  modified_base 14: mod_base = OTHER; note = 2'O-methyl uridine
  modified_base 15: mod_base = OTHER; note = 2'-fluoro guanosine
  modified_base 16: mod_base = OTHER; note = 2'O-methyl adenosine
  modified_base 17: mod_base = OTHER; note = 2'-fluoro cytidine
  modified_base 18: mod_base = OTHER; note = 2'O-methyl adenosine
  modified_base 19: mod_base = OTHER; note = 2'-fluoro adenosine phosphorothioate
  modified_base 20: mod_base = OTHER; note = 2'O-methyl uridine phosphorothioate
  modified_base 21: mod_base = OTHER; note = 2'O-methyl uridine
atggaggagtgagtgacaatt

SEQ ID NO: 1044 - RNA, 21 nt, synthetic construct
  source 1..21: mol_type = other RNA
  modified_base 1: mod_base = OTHER; note = 2'-fluoro adenosine phosphorothioate
  modified_base 2: mod_base = OTHER; note = 2'O-methyl guanosine phosphorothioate
  modified_base 3: mod_base = OTHER; note = 2'-fluoro guanosine
  modified_base 4: mod_base = OTHER; note = 2'O-methyl adenosine
  modified_base 5: mod_base = OTHER; note = 2'-fluoro guanosine
  modified_base 6: mod_base = OTHER; note = 2'O-methyl uridine
  modified_base 7: mod_base = OTHER; note = 2'-fluoro guanosine
  modified_base 8: mod_base = OTHER; note = 2'O-methyl adenosine
  modified_base 9: mod_base = OTHER; note = 2'-fluoro guanosine
  modified_base 10: mod_base = OTHER; note = 2'O-methyl uridine
  modified_base 11: mod_base = OTHER; note = 2'-fluoro guanosine
  modified_base 12: mod_base = OTHER; note = 2'O-methyl adenosine
  modified_base 13: mod_base = OTHER; note = 2'-fluoro cytidine
  modified_base 14: mod_base = OTHER; note = 2'O-methyl adenosine
  modified_base 15: mod_base = OTHER; note = 2'-fluoro adenosine
  modified_base 16: mod_base = OTHER; note = 2'O-methyl cytidine
  modified_base 17: mod_base = OTHER; note = 2'-fluoro guanosine
  modified_base 18: mod_base = OTHER; note = 2'O-methyl uridine
  modified_base 19: mod_base = OTHER; note = 2'-fluoro adenosine phosphorothioate
  modified_base 20: mod_base = OTHER; note = 2'O-methyl uridine phosphorothioate
  modified_base 21: mod_base = OTHER; note = 2'O-methyl uridine
aggagtgagtgacaacgtatt

SEQ ID NO: 1045 - RNA, 21 nt, synthetic construct
  source 1..21: mol_type = other RNA
  modified_base 1: mod_base = OTHER; note = 2'-fluoro guanosine phosphorothioate
  modified_base 2: mod_base = OTHER; note = 2'O-methyl guanosine phosphorothioate
  modified_base 3: mod_base = OTHER; note = 2'-fluoro adenosine
  modified_base 4: mod_base = OTHER; note = 2'O-methyl guanosine
  modified_base 5: mod_base = OTHER; note = 2'-fluoro uridine
  modified_base 6: mod_base = OTHER; note = 2'O-methyl guanosine
  modified_base 7: mod_base = OTHER; note = 2'-fluoro adenosine
  modified_base 8: mod_base = OTHER; note = 2'O-methyl guanosine
  modified_base 9: mod_base = OTHER; note = 2'-fluoro uridine
  modified_base 10: mod_base = OTHER; note = 2'O-methyl guanosine
  modified_base 11: mod_base = OTHER; note = 2'-fluoro adenosine
  modified_base 12: mod_base = OTHER; note = 2'O-methyl cytidine
  modified_base 13: mod_base = OTHER; note = 2'-fluoro adenosine
  modified_base 14: mod_base = OTHER; note = 2'O-methyl adenosine
  modified_base 15: mod_base = OTHER; note = 2'-fluoro cytidine
  modified_base 16: mod_base = OTHER; note = 2'O-methyl guanosine
  modified_base 17: mod_base = OTHER; note = 2'-fluoro uridine
  modified_base 18: mod_base = OTHER; note = 2'O-methyl adenosine
  modified_base 19: mod_base = OTHER; note = 2'-fluoro cytidine phosphorothioate
  modified_base 20: mod_base = OTHER; note = 2'O-methyl uridine phosphorothioate
  modified_base 21: mod_base = OTHER; note = 2'O-methyl uridine
ggagtgagtgacaacgtactt

SEQ ID NO: 1046 - RNA, 21 nt, synthetic construct
  source 1..21: mol_type = other RNA
  modified_base 1: mod_base = OTHER; note = 2'-fluoro adenosine phosphorothioate
  modified_base 2: mod_base = OTHER; note = 2'O-methyl guanosine phosphorothioate
  modified_base 3: mod_base = OTHER; note = 2'-fluoro uridine
  modified_base 4: mod_base = OTHER; note = 2'O-methyl guanosine
  modified_base 5: mod_base = OTHER; note = 2'-fluoro adenosine
  modified_base 6: mod_base = OTHER; note = 2'O-methyl guanosine
  modified_base 7: mod_base = OTHER; note = 2'-fluoro uridine
  modified_base 8: mod_base = OTHER; note = 2'O-methyl guanosine
  modified_base 9: mod_base = OTHER; note = 2'-fluoro adenosine
  modified_base 10: mod_base = OTHER; note = 2'O-methyl cytidine
  modified_base 11: mod_base = OTHER; note = 2'-fluoro adenosine
  modified_base 12: mod_base = OTHER; note = 2'O-methyl adenosine
  modified_base 13: mod_base = OTHER; note = 2'-fluoro cytidine
  modified_base 14: mod_base = OTHER; note = 2'O-methyl guanosine
  modified_base 15: mod_base = OTHER; note = 2'-fluoro uridine
  modified_base 16: mod_base = OTHER; note = 2'O-methyl adenosine
  modified_base 17: mod_base = OTHER; note = 2'-fluoro cytidine
  modified_base 18: mod_base = OTHER; note = 2'O-methyl cytidine
  modified_base 19: mod_base = OTHER; note = 2'-fluoro cytidine phosphorothioate
  modified_base 20: mod_base = OTHER; note = 2'O-methyl uridine phosphorothioate
  modified_base 21: mod_base = OTHER; note = 2'O-methyl uridine
agtgagtgacaacgtaccctt

SEQ ID NO: 1047 - RNA, 21 nt, synthetic construct
  source 1..21: mol_type = other RNA
  modified_base 1: mod_base = OTHER; note = 2'-fluoro guanosine phosphorothioate
  modified_base 2: mod_base = OTHER; note = 2'O-methyl uridine phosphorothioate
  modified_base 3: mod_base = OTHER; note = 2'-fluoro guanosine
  modified_base 4: mod_base = OTHER; note = 2'O-methyl adenosine
  modified_base 5: mod_base = OTHER; note = 2'-fluoro guanosine
  modified_base 6: mod_base = OTHER; note = 2'O-methyl uridine
  modified_base 7: mod_base = OTHER; note = 2'-fluoro guanosine
  modified_base 8: mod_base = OTHER; note = 2'O-methyl adenosine
  modified_base 9: mod_base = OTHER; note = 2'-fluoro cytidine
  modified_base 10: mod_base = OTHER; note = 2'O-methyl adenosine
  modified_base 11: mod_base = OTHER; note = 2'-fluoro adenosine
  modified_base 12: mod_base = OTHER; note = 2'O-methyl cytidine
  modified_base 13: mod_base = OTHER; note = 2'-fluoro guanosine
  modified_base 14: mod_base = OTHER; note = 2'O-methyl uridine
  modified_base 15: mod_base = OTHER; note = 2'-fluoro adenosine
  modified_base 16: mod_base = OTHER; note = 2'O-methyl cytidine
  modified_base 17: mod_base = OTHER; note = 2'-fluoro cytidine
  modified_base 18: mod_base = OTHER; note = 2'O-methyl cytidine
  modified_base 19: mod_base = OTHER; note = 2'-fluoro uridine phosphorothioate
  modified_base 20: mod_base = OTHER; note = 2'O-methyl uridine phosphorothioate
  modified_base 21: mod_base = OTHER; note = 2'O-methyl uridine
gtgagtgacaacgtacccttt

SEQ ID NO: 1048 - RNA, 21 nt, synthetic construct
  source 1..21: mol_type = other RNA
  modified_base 1: mod_base = OTHER; note = 2'-fluoro guanosine phosphorothioate
  modified_base 2: mod_base = OTHER; note = 2'O-methyl adenosine phosphorothioate
  modified_base 3: mod_base = OTHER; note = 2'-fluoro guanosine
  modified_base 4: mod_base = OTHER; note = 2'O-methyl uridine
  modified_base 5: mod_base = OTHER; note = 2'-fluoro guanosine
  modified_base 6: mod_base = OTHER; note = 2'O-methyl adenosine
  modified_base 7: mod_base = OTHER; note = 2'-fluoro cytidine
  modified_base 8: mod_base = OTHER; note = 2'O-methyl adenosine
  modified_base 9: mod_base = OTHER; note = 2'-fluoro adenosine
  modified_base 10: mod_base = OTHER; note = 2'O-methyl cytidine
  modified_base 11: mod_base = OTHER; note = 2'-fluoro guanosine
  modified_base 12: mod_base = OTHER; note = 2'O-methyl uridine
  modified_base 13: mod_base = OTHER; note = 2'-fluoro adenosine
  modified_base 14: mod_base = OTHER; note = 2'O-methyl cytidine
  modified_base 15: mod_base = OTHER; note = 2'-fluoro cytidine
  modified_base 16: mod_base = OTHER; note = 2'O-methyl cytidine
  modified_base 17: mod_base = OTHER; note = 2'-fluoro uridine
  modified_base 18: mod_base = OTHER; note = 2'O-methyl uridine
  modified_base 19: mod_base = OTHER; note = 2'-fluoro cytidine phosphorothioate
  modified_base 20: mod_base = OTHER; note = 2'O-methyl uridine phosphorothioate
  modified_base 21: mod_base = OTHER; note = 2'O-methyl uridine
gagtgacaacgtacccttctt

SEQ ID NO: 1049 - RNA, 21 nt, synthetic construct
  source 1..21: mol_type = other RNA
  modified_base 1: mod_base = OTHER; note = 2'-fluoro adenosine phosphorothioate
  modified_base 2: mod_base = OTHER; note = 2'O-methyl uridine phosphorothioate
  modified_base 3: mod_base = OTHER; note = 2'-fluoro guanosine
  modified_base 4: mod_base = OTHER; note = 2'O-methyl cytidine
  modified_base 5: mod_base = OTHER; note = 2'-fluoro cytidine
  modified_base 6: mod_base = OTHER; note = 2'O-methyl adenosine
  modified_base 7: mod_base = OTHER; note = 2'-fluoro adenosine
  modified_base 8: mod_base = OTHER; note = 2'O-methyl adenosine
  modified_base 9: mod_base = OTHER; note = 2'-fluoro adenosine
  modified_base 10: mod_base = OTHER; note = 2'O-methyl cytidine
  modified_base 11: mod_base = OTHER; note = 2'-fluoro adenosine
  modified_base 12: mod_base = OTHER; note = 2'O-methyl adenosine
  modified_base 13: mod_base = OTHER; note = 2'-fluoro cytidine
  modified_base 14: mod_base = OTHER; note = 2'O-methyl cytidine
  modified_base 15: mod_base = OTHER; note = 2'-fluoro adenosine
  modified_base 16: mod_base = OTHER; note = 2'O-methyl uridine
  modified_base 17: mod_base = OTHER; note = 2'-fluoro cytidine
  modified_base 18: mod_base = OTHER; note = 2'O-methyl adenosine
  modified_base 19: mod_base = OTHER; note = 2'-fluoro cytidine phosphorothioate
  modified_base 20: mod_base = OTHER; note = 2'O-methyl uridine phosphorothioate
  modified_base 21: mod_base = OTHER; note = 2'O-methyl uridine
atgccaaaacaaccatcactt

SEQ ID NO: 1050 - RNA, 21 nt, synthetic construct
  source 1..21: mol_type = other RNA
  modified_base 1: mod_base = OTHER; note = 2'-fluoro uridine phosphorothioate
  modified_base 2: mod_base = OTHER; note = 2'O-methyl guanosine phosphorothioate
  modified_base 3: mod_base = OTHER; note = 2'-fluoro cytidine
  modified_base 4: mod_base = OTHER; note = 2'O-methyl cytidine
  modified_base 5: mod_base = OTHER; note = 2'-fluoro adenosine
  modified_base 6: mod_base = OTHER; note = 2'O-methyl adenosine
  modified_base 7: mod_base = OTHER; note = 2'-fluoro adenosine
  modified_base 8: mod_base = OTHER; note = 2'O-methyl adenosine
  modified_base 9: mod_base = OTHER; note = 2'-fluoro cytidine
  modified_base 10: mod_base = OTHER; note = 2'O-methyl adenosine
  modified_base 11: mod_base = OTHER; note = 2'-fluoro adenosine
  modified_base 12: mod_base = OTHER; note = 2'O-methyl cytidine
  modified_base 13: mod_base = OTHER; note = 2'-fluoro cytidine
  modified_base 14: mod_base = OTHER; note = 2'O-methyl adenosine
  modified_base 15: mod_base = OTHER; note = 2'-fluoro uridine
  modified_base 16: mod_base = OTHER; note = 2'O-methyl cytidine
  modified_base 17: mod_base = OTHER; note = 2'-fluoro adenosine
  modified_base 18: mod_base = OTHER; note = 2'O-methyl cytidine
  modified_base 19: mod_base = OTHER; note = 2'-fluoro cytidine phosphorothioate
  modified_base 20: mod_base = OTHER; note = 2'O-methyl uridine phosphorothioate
  modified_base 21: mod_base = OTHER; note = 2'O-methyl uridine
tgccaaaacaaccatcacctt

SEQ ID NO: 1051 - RNA, 21 nt, synthetic construct
  source 1..21: mol_type = other RNA
  modified_base 1: mod_base = OTHER; note = 2'-fluoro guanosine phosphorothioate
  modified_base 2: mod_base = OTHER; note = 2'O-methyl cytidine phosphorothioate
  modified_base 3: mod_base = OTHER; note = 2'-fluoro cytidine
  modified_base 4: mod_base = OTHER; note = 2'O-methyl adenosine
  modified_base 5: mod_base = OTHER; note = 2'-fluoro adenosine
  modified_base 6: mod_base = OTHER; note = 2'O-methyl adenosine
  modified_base 7: mod_base = OTHER; note = 2'-fluoro adenosine
  modified_base 8: mod_base = OTHER; note = 2'O-methyl cytidine
  modified_base 9: mod_base = OTHER; note = 2'-fluoro adenosine
  modified_base 10: mod_base = OTHER; note = 2'O-methyl adenosine
  modified_base 11: mod_base = OTHER; note = 2'-fluoro cytidine
  modified_base 12: mod_base = OTHER; note = 2'O-methyl cytidine
  modified_base 13: mod_base = OTHER; note = 2'-fluoro adenosine
  modified_base 14: mod_base = OTHER; note = 2'O-methyl uridine
  modified_base 15: mod_base = OTHER; note = 2'-fluoro cytidine
  modified_base 16: mod_base = OTHER; note = 2'O-methyl adenosine
  modified_base 17: mod_base = OTHER; note = 2'-fluoro cytidine
  modified_base 18: mod_base = OTHER; note = 2'O-methyl cytidine
  modified_base 19: mod_base = OTHER; note = 2'-fluoro guanosine phosphorothioate
  modified_base 20: mod_base = OTHER; note = 2'O-methyl uridine phosphorothioate
  modified_base 21: mod_base = OTHER; note = 2'O-methyl uridine
gccaaaacaaccatcaccgtt

SEQ ID NO: 1052 - RNA, 21 nt, synthetic construct
  source 1..21: mol_type = other RNA
  modified_base 1: mod_base = OTHER; note = 2'-fluoro adenosine phosphorothioate
  modified_base 2: mod_base = OTHER; note = 2'O-methyl adenosine phosphorothioate
  modified_base 3: mod_base = OTHER; note = 2'-fluoro adenosine
  modified_base 4: mod_base = OTHER; note = 2'O-methyl adenosine
  modified_base 5: mod_base = OTHER; note = 2'-fluoro cytidine
  modified_base 6: mod_base = OTHER; note = 2'O-methyl adenosine
  modified_base 7: mod_base = OTHER; note = 2'-fluoro adenosine
  modified_base 8: mod_base = OTHER; note = 2'O-methyl cytidine
  modified_base 9: mod_base = OTHER; note = 2'-fluoro cytidine
  modified_base 10: mod_base = OTHER; note = 2'O-methyl adenosine
  modified_base 11: mod_base = OTHER; note = 2'-fluoro uridine
  modified_base 12: mod_base = OTHER; note = 2'O-methyl cytidine
  modified_base 13: mod_base = OTHER; note = 2'-fluoro adenosine
  modified_base 14: mod_base = OTHER; note = 2'O-methyl cytidine
  modified_base 15: mod_base = OTHER; note = 2'-fluoro cytidine
  modified_base 16: mod_base = OTHER; note = 2'O-methyl guanosine
  modified_base 17: mod_base = OTHER; note = 2'-fluoro uridine
  modified_base 18: mod_base = OTHER; note = 2'O-methyl guanosine
  modified_base 19: mod_base = OTHER; note = 2'-fluoro uridine phosphorothioate
  modified_base 20: mod_base = OTHER; note = 2'O-methyl uridine phosphorothioate
  modified_base 21: mod_base = OTHER; note = 2'O-methyl uridine
aaaacaaccatcaccgtgttt

SEQ ID NO: 1053 - RNA, 21 nt, synthetic construct
  source 1..21: mol_type = other RNA
  modified_base 1: mod_base = OTHER; note = 2'-fluoro adenosine phosphorothioate
  modified_base 2: mod_base = OTHER; note = 2'O-methyl adenosine phosphorothioate
  modified_base 3: mod_base = OTHER; note = 2'-fluoro adenosine
  modified_base 4: mod_base = OTHER; note = 2'O-methyl cytidine
  modified_base 5: mod_base = OTHER; note = 2'-fluoro adenosine
  modified_base 6: mod_base = OTHER; note = 2'O-methyl adenosine
  modified_base 7: mod_base = OTHER; note = 2'-fluoro cytidine
  modified_base 8: mod_base = OTHER; note = 2'O-methyl cytidine
  modified_base 9: mod_base = OTHER; note = 2'-fluoro adenosine
  modified_base 10: mod_base = OTHER; note = 2'O-methyl uridine
  modified_base 11: mod_base = OTHER; note = 2'-fluoro cytidine
  modified_base 12: mod_base = OTHER; note = 2'O-methyl adenosine
  modified_base 13: mod_base = OTHER; note = 2'-fluoro cytidine
  modified_base 14: mod_base = OTHER; note = 2'O-methyl cytidine
  modified_base 15: mod_base = OTHER; note = 2'-fluoro guanosine
  modified_base 16: mod_base = OTHER; note = 2'O-methyl uridine
  modified_base 17: mod_base = OTHER; note = 2'-fluoro guanosine
  modified_base 18: mod_base = OTHER; note = 2'O-methyl uridine
  modified_base 19: mod_base = OTHER; note = 2'-fluoro cytidine phosphorothioate
  modified_base 20: mod_base = OTHER; note = 2'O-methyl uridine phosphorothioate
  modified_base 21: mod_base = OTHER; note = 2'O-methyl uridine
aaacaaccatcaccgtgtctt

SEQ ID NO: 1054 - RNA, 21 nt, synthetic construct
  source 1..21: mol_type = other RNA
  modified_base 1: mod_base = OTHER; note = 2'-fluoro adenosine phosphorothioate
  modified_base 2: mod_base = OTHER; note = 2'O-methyl cytidine phosphorothioate
  modified_base 3: mod_base = OTHER; note = 2'-fluoro adenosine
  modified_base 4: mod_base = OTHER; note = 2'O-methyl adenosine
  modified_base 5: mod_base = OTHER; note = 2'-fluoro cytidine
  modified_base 6: mod_base = OTHER; note = 2'O-methyl cytidine
  modified_base 7: mod_base = OTHER; note = 2'-fluoro adenosine
  modified_base 8: mod_base = OTHER; note = 2'O-methyl uridine
  modified_base 9: mod_base = OTHER; note = 2'-fluoro cytidine
  modified_base 10: mod_base = OTHER; note = 2'O-methyl adenosine
  modified_base 11: mod_base = OTHER; note = 2'-fluoro cytidine
  modified_base 12: mod_base = OTHER; note = 2'O-methyl cytidine
  modified_base 13: mod_base = OTHER; note = 2'-fluoro guanosine
  modified_base 14: mod_base = OTHER; note = 2'O-methyl uridine
  modified_base 15: mod_base = OTHER; note = 2'-fluoro guanosine
  modified_base 16: mod_base = OTHER; note = 2'O-methyl uridine
  modified_base 17: mod_base = OTHER; note = 2'-fluoro cytidine
  modified_base 18: mod_base = OTHER; note = 2'O-methyl cytidine
  modified_base 19: mod_base = OTHER; note = 2'-fluoro cytidine phosphorothioate
  modified_base 20: mod_base = OTHER; note = 2'O-methyl uridine phosphorothioate
  modified_base 21: mod_base = OTHER; note = 2'O-methyl uridine
acaaccatcaccgtgtccctt

SEQ ID NO: 1055 - RNA, 21 nt, synthetic construct
  source 1..21: mol_type = other RNA
  modified_base 1: mod_base = OTHER; note = 2'-fluoro cytidine phosphorothioate
  modified_base 2: mod_base = OTHER; note = 2'O-methyl adenosine phosphorothioate
  modified_base 3: mod_base = OTHER; note = 2'-fluoro adenosine
  modified_base 4: mod_base = OTHER; note = 2'O-methyl cytidine
  modified_base 5: mod_base = OTHER; note = 2'-fluoro cytidine
  modified_base 6: mod_base = OTHER; note = 2'O-methyl adenosine
  modified_base 7: mod_base = OTHER; note = 2'-fluoro uridine
  modified_base 8: mod_base = OTHER; note = 2'O-methyl cytidine
  modified_base 9: mod_base = OTHER; note = 2'-fluoro adenosine
  modified_base 10: mod_base = OTHER; note = 2'O-methyl cytidine
  modified_base 11: mod_base = OTHER; note = 2'-fluoro cytidine
  modified_base 12: mod_base = OTHER; note = 2'O-methyl guanosine
  modified_base 13: mod_base = OTHER; note = 2'-fluoro uridine
  modified_base 14: mod_base = OTHER; note = 2'O-methyl guanosine
  modified_base 15: mod_base = OTHER; note = 2'-fluoro uridine
  modified_base 16: mod_base = OTHER; note = 2'O-methyl cytidine
  modified_base 17: mod_base = OTHER; note = 2'-fluoro cytidine
  modified_base 18: mod_base = OTHER; note = 2'O-methyl cytidine
  modified_base 19: mod_base = OTHER; note = 2'-fluoro cytidine phosphorothioate
  modified_base 20: mod_base = OTHER; note = 2'O-methyl uridine phosphorothioate
  modified_base 21: mod_base = OTHER; note = 2'O-methyl uridine
caaccatcaccgtgtcccctt

SEQ ID NO: 1056 - RNA, 21 nt, synthetic construct
  source 1..21: mol_type = other RNA
  modified_base 1: mod_base = OTHER; note = 2'-fluoro adenosine phosphorothioate
  modified_base 2: mod_base = OTHER; note = 2'O-methyl adenosine phosphorothioate
  modified_base 3: mod_base = OTHER; note = 2'-fluoro cytidine
  modified_base 4: mod_base = OTHER; note = 2'O-methyl cytidine
  modified_base 5: mod_base = OTHER; note = 2'-fluoro adenosine
  modified_base 6: mod_base = OTHER; note = 2'O-methyl uridine
  modified_base 7: mod_base = OTHER; note = 2'-fluoro cytidine
  modified_base 8: mod_base = OTHER; note = 2'O-methyl adenosine
  modified_base 9: mod_base = OTHER; note = 2'-fluoro cytidine
  modified_base 10: mod_base = OTHER; note = 2'O-methyl cytidine
  modified_base 11: mod_base = OTHER; note = 2'-fluoro guanosine
  modified_base 12: mod_base = OTHER; note = 2'O-methyl uridine
  modified_base 13: mod_base = OTHER; note = 2'-fluoro guanosine
  modified_base 14: mod_base = OTHER; note = 2'O-methyl uridine
  modified_base 15: mod_base = OTHER; note = 2'-fluoro cytidine
  modified_base 16: mod_base = OTHER; note = 2'O-methyl cytidine
  modified_base 17: mod_base = OTHER; note = 2'-fluoro cytidine
  modified_base 18: mod_base = OTHER; note = 2'O-methyl cytidine
  modified_base 19: mod_base = OTHER; note = 2'-fluoro cytidine phosphorothioate
  modified_base 20: mod_base = OTHER; note = 2'O-methyl uridine phosphorothioate
  modified_base 21: mod_base = OTHER; note = 2'O-methyl uridine
aaccatcaccgtgtccccctt

SEQ ID NO: 1057 - RNA, 21 nt, synthetic construct
  source 1..21: mol_type = other RNA
  modified_base 1: mod_base = OTHER; note = 2'-fluoro cytidine phosphorothioate
  modified_base 2: mod_base = OTHER; note = 2'O-methyl adenosine phosphorothioate
  modified_base 3: mod_base = OTHER; note = 2'-fluoro cytidine
  modified_base 4: mod_base = OTHER; note = 2'O-methyl cytidine
  modified_base 5: mod_base = OTHER; note = 2'-fluoro guanosine
  modified_base 6: mod_base = OTHER; note = 2'O-methyl uridine
  modified_base 7: mod_base = OTHER; note = 2'-fluoro guanosine
  modified_base 8: mod_base = OTHER; note = 2'O-methyl uridine
  modified_base 9: mod_base = OTHER; note = 2'-fluoro cytidine
  modified_base 10: mod_base = OTHER; note = 2'O-methyl cytidine
  modified_base 11: mod_base = OTHER; note = 2'-fluoro cytidine
  modified_base 12: mod_base = OTHER; note = 2'O-methyl cytidine
  modified_base 13: mod_base = OTHER; note = 2'-fluoro cytidine
  modified_base 14: mod_base = OTHER; note = 2'O-methyl uridine
  modified_base 15: mod_base = OTHER; note = 2'-fluoro uridine
  modified_base 16: mod_base = OTHER; note = 2'O-methyl cytidine
  modified_base 17: mod_base = OTHER; note = 2'-fluoro uridine
  modified_base 18: mod_base = OTHER; note = 2'O-methyl adenosine
  modified_base 19: mod_base = OTHER; note = 2'-fluoro uridine phosphorothioate
  modified_base 20: mod_base = OTHER; note = 2'O-methyl uridine phosphorothioate
  modified_base 21: mod_base = OTHER; note = 2'O-methyl uridine
caccgtgtcccccttctattt

SEQ ID NO: 1058 - RNA, 21 nt, synthetic construct
  source 1..21: mol_type = other RNA
  modified_base 1: mod_base = OTHER; note = 2'-fluoro adenosine phosphorothioate
  modified_base 2: mod_base = OTHER; note = 2'O-methyl cytidine phosphorothioate
  modified_base 3: mod_base = OTHER; note = 2'-fluoro cytidine
  modified_base 4: mod_base = OTHER; note = 2'O-methyl guanosine
  modified_base 5: mod_base = OTHER; note = 2'-fluoro uridine
  modified_base 6: mod_base = OTHER; note = 2'O-methyl guanosine
  modified_base 7: mod_base = OTHER; note = 2'-fluoro uridine
  modified_base 8: mod_base = OTHER; note = 2'O-methyl cytidine
  modified_base 9: mod_base = OTHER; note = 2'-fluoro cytidine
  modified_base 10: mod_base = OTHER; note = 2'O-methyl cytidine
  modified_base 11: mod_base = OTHER; note = 2'-fluoro cytidine
  modified_base 12: mod_base = OTHER; note = 2'O-methyl cytidine
  modified_base 13: mod_base = OTHER; note = 2'-fluoro uridine
  modified_base 14: mod_base = OTHER; note = 2'O-methyl uridine
  modified_base 15: mod_base = OTHER; note = 2'-fluoro cytidine
  modified_base 16: mod_base = OTHER; note = 2'O-methyl uridine
  modified_base 17: mod_base = OTHER; note = 2'-fluoro adenosine
  modified_base 18: mod_base = OTHER; note = 2'O-methyl uridine
  modified_base 19: mod_base = OTHER; note = 2'-fluoro guanosine phosphorothioate
  modified_base 20: mod_base = OTHER; note = 2'O-methyl uridine phosphorothioate
  modified_base 21: mod_base = OTHER; note = 2'O-methyl uridine
accgtgtcccccttctatgtt

SEQ ID NO: 1059 - RNA, 21 nt, synthetic construct
  source 1..21: mol_type = other RNA
  modified_base 1: mod_base = OTHER; note = 2'-fluoro guanosine phosphorothioate
  modified_base 2: mod_base = OTHER; note = 2'O-methyl uridine phosphorothioate
  modified_base 3: mod_base = OTHER; note = 2'-fluoro guanosine
  modified_base 4: mod_base = OTHER; note = 2'O-methyl uridine
  modified_base 5: mod_base = OTHER; note = 2'-fluoro cytidine
  modified_base 6: mod_base = OTHER; note = 2'O-methyl cytidine
  modified_base 7: mod_base = OTHER; note = 2'-fluoro cytidine
  modified_base 8: mod_base = OTHER; note = 2'O-methyl cytidine
  modified_base 9: mod_base = OTHER; note = 2'-fluoro cytidine
  modified_base 10: mod_base = OTHER; note = 2'O-methyl uridine
  modified_base 11: mod_base = OTHER; note = 2'-fluoro uridine
  modified_base 12: mod_base = OTHER; note = 2'O-methyl cytidine
  modified_base 13: mod_base = OTHER; note = 2'-fluoro uridine
  modified_base 14: mod_base = OTHER; note = 2'O-methyl adenosine
  modified_base 15: mod_base = OTHER; note = 2'-fluoro uridine
  modified_base 16: mod_base = OTHER; note = 2'O-methyl guanosine
  modified_base 17: mod_base = OTHER; note = 2'-fluoro guanosine
  modified_base 18: mod_base = OTHER; note = 2'O-methyl guanosine
  modified_base 19: mod_base = OTHER; note = 2'-fluoro guanosine phosphorothioate
  modified_base 20: mod_base = OTHER; note = 2'O-methyl uridine phosphorothioate
  modified_base 21: mod_base = OTHER; note = 2'O-methyl uridine
gtgtcccccttctatggggtt

SEQ ID NO: 1060 - RNA, 21 nt, synthetic construct
  source 1..21: mol_type = other RNA
  modified_base 1: mod_base = OTHER; note = 2'-fluoro uridine phosphorothioate
  modified_base 2: mod_base = OTHER; note = 2'O-methyl guanosine phosphorothioate
  modified_base 3: mod_base = OTHER; note = 2'-fluoro uridine
  modified_base 4: mod_base = OTHER; note = 2'O-methyl cytidine
  modified_base 5: mod_base = OTHER; note = 2'-fluoro cytidine
  modified_base 6: mod_base = OTHER; note = 2'O-methyl cytidine
  modified_base 7: mod_base = OTHER; note = 2'-fluoro cytidine
  modified_base 8: mod_base = OTHER; note = 2'O-methyl cytidine
  modified_base 9: mod_base = OTHER; note = 2'-fluoro uridine
  modified_base 10: mod_base = OTHER; note = 2'O-methyl uridine
  modified_base 11: mod_base = OTHER; note = 2'-fluoro cytidine
  modified_base 12: mod_base = OTHER; note = 2'O-methyl uridine
  modified_base 13: mod_base = OTHER; note = 2'-fluoro adenosine
  modified_base 14: mod_base = OTHER; note = 2'O-methyl uridine
  modified_base 15: mod_base = OTHER; note = 2'-fluoro guanosine
  modified_base 16: mod_base = OTHER; note = 2'O-methyl guanosine
  modified_base 17: mod_base = OTHER; note = 2'-fluoro guanosine
  modified_base 18: mod_base = OTHER; note = 2'O-methyl guanosine
  modified_base 19: mod_base = OTHER; note = 2'-fluoro adenosine phosphorothioate
  modified_base 20: mod_base = OTHER; note = 2'O-methyl uridine phosphorothioate
  modified_base 21: mod_base = OTHER; note = 2'O-methyl uridine
tgtcccccttctatggggatt

SEQ ID NO: 1061 - RNA, 21 nt, synthetic construct
  source 1..21: mol_type = other RNA
  modified_base 1: mod_base = OTHER; note = 2'-fluoro guanosine phosphorothioate
  modified_base 2: mod_base = OTHER; note = 2'O-methyl uridine phosphorothioate
  modified_base 3: mod_base = OTHER; note = 2'-fluoro cytidine
  modified_base 4: mod_base = OTHER; note = 2'O-methyl cytidine
  modified_base 5: mod_base = OTHER; note = 2'-fluoro cytidine
  modified_base 6: mod_base = OTHER; note = 2'O-methyl cytidine
  modified_base 7: mod_base = OTHER; note = 2'-fluoro cytidine
  modified_base 8: mod_base = OTHER; note = 2'O-methyl uridine
  modified_base 9: mod_base = OTHER; note = 2'-fluoro uridine
  modified_base 10: mod_base = OTHER; note = 2'O-methyl cytidine
  modified_base 11: mod_base = OTHER; note = 2'-fluoro uridine
  modified_base 12: mod_base = OTHER; note = 2'O-methyl adenosine
  modified_base 13: mod_base = OTHER; note = 2'-fluoro uridine
  modified_base 14: mod_base = OTHER; note = 2'O-methyl guanosine
  modified_base 15: mod_base = OTHER; note = 2'-fluoro guanosine
  modified_base 16: mod_base = OTHER; note = 2'O-methyl guanosine
  modified_base 17: mod_base = OTHER; note = 2'-fluoro guanosine
  modified_base 18: mod_base = OTHER; note = 2'O-methyl adenosine
  modified_base 19: mod_base = OTHER; note = 2'-fluoro guanosine phosphorothioate
  modified_base 20: mod_base = OTHER; note = 2'O-methyl uridine phosphorothioate
  modified_base 21: mod_base = OTHER; note = 2'O-methyl uridine
gtcccccttctatggggagtt

SEQ ID NO: 1062 - RNA, 21 nt, synthetic construct
  source 1..21: mol_type = other RNA
  modified_base 1: mod_base = OTHER; note = 2'-fluoro uridine phosphorothioate
  modified_base 2: mod_base = OTHER; note = 2'O-methyl cytidine phosphorothioate
  modified_base 3: mod_base = OTHER; note = 2'-fluoro cytidine
  modified_base 4: mod_base = OTHER; note = 2'O-methyl cytidine
  modified_base 5: mod_base = OTHER; note = 2'-fluoro cytidine
  modified_base 6: mod_base = OTHER; note = 2'O-methyl cytidine
  modified_base 7: mod_base = OTHER; note = 2'-fluoro uridine
  modified_base 8: mod_base = OTHER; note = 2'O-methyl uridine
  modified_base 9: mod_base = OTHER; note = 2'-fluoro cytidine
  modified_base 10: mod_base = OTHER; note = 2'O-methyl uridine
  modified_base 11: mod_base = OTHER; note = 2'-fluoro adenosine
  modified_base 12: mod_base = OTHER; note = 2'O-methyl uridine
  modified_base 13: mod_base = OTHER; note = 2'-fluoro guanosine
  modified_base 14: mod_base = OTHER; note = 2'O-methyl guanosine
  modified_base 15: mod_base = OTHER; note = 2'-fluoro guanosine
  modified_base 16: mod_base = OTHER; note = 2'O-methyl guanosine
  modified_base 17: mod_base = OTHER; note = 2'-fluoro adenosine
  modified_base 18: mod_base = OTHER; note = 2'O-methyl guanosine
  modified_base 19: mod_base = OTHER; note = 2'-fluoro uridine phosphorothioate
  modified_base 20: mod_base = OTHER; note = 2'O-methyl uridine phosphorothioate
  modified_base 21: mod_base = OTHER; note = 2'O-methyl uridine
tcccccttctatggggagttt

SEQ ID NO: 1063 - RNA, 21 nt, synthetic construct
  source 1..21: mol_type = other RNA
  modified_base 1: mod_base = OTHER; note = 2'-fluoro cytidine phosphorothioate
  modified_base 2: mod_base = OTHER; note = 2'O-methyl cytidine phosphorothioate
  modified_base 3: mod_base = OTHER; note = 2'-fluoro cytidine
  modified_base 4: mod_base = OTHER; note = 2'O-methyl uridine
  modified_base 5: mod_base = OTHER; note = 2'-fluoro uridine
  modified_base 6: mod_base = OTHER; note = 2'O-methyl cytidine
  modified_base 7: mod_base = OTHER; note = 2'-fluoro uridine
  modified_base 8: mod_base = OTHER; note = 2'O-methyl adenosine
  modified_base 9: mod_base = OTHER; note = 2'-fluoro uridine
  modified_base 10: mod_base = OTHER; note = 2'O-methyl guanosine
  modified_base 11: mod_base = OTHER; note = 2'-fluoro guanosine
  modified_base 12: mod_base = OTHER; note = 2'O-methyl guanosine
  modified_base 13: mod_base = OTHER; note = 2'-fluoro guanosine
  modified_base 14: mod_base = OTHER; note = 2'O-methyl adenosine
  modified_base 15: mod_base = OTHER; note = 2'-fluoro guanosine
  modified_base 16: mod_base = OTHER; note = 2'O-methyl uridine
  modified_base 17: mod_base = OTHER; note = 2'-fluoro adenosine
  modified_base 18: mod_base = OTHER; note = 2'O-methyl cytidine
  modified_base 19: mod_base = OTHER; note = 2'-fluoro guanosine phosphorothioate
  modified_base 20: mod_base = OTHER; note = 2'O-methyl uridine phosphorothioate
  modified_base 21: mod_base = OTHER; note = 2'O-methyl uridine
cccttctatggggagtacgtt

SEQ ID NO: 1064 - RNA, 21 nt, synthetic construct
  source 1..21: mol_type = other RNA
  modified_base 1: mod_base = OTHER; note = 2'-fluoro cytidine phosphorothioate
  modified_base 2: mod_base = OTHER; note = 2'O-methyl cytidine phosphorothioate
  modified_base 3: mod_base = OTHER; note = 2'-fluoro uridine
  modified_base 4: mod_base = OTHER; note = 2'O-methyl uridine
  modified_base 5: mod_base = OTHER; note = 2'-fluoro cytidine
  modified_base 6: mod_base = OTHER; note = 2'O-methyl uridine
  modified_base 7: mod_base = OTHER; note = 2'-fluoro adenosine
  modified_base 8: mod_base = OTHER; note = 2'O-methyl uridine
  modified_base 9: mod_base = OTHER; note = 2'-fluoro guanosine
  modified_base 10: mod_base = OTHER; note = 2'O-methyl guanosine
  modified_base 11: mod_base = OTHER; note = 2'-fluoro guanosine
  modified_base 12: mod_base = OTHER; note = 2'O-methyl guanosine
  modified_base 13: mod_base = OTHER; note = 2'-fluoro adenosine
  modified_base 14: mod_base = OTHER; note = 2'O-methyl guanosine
  modified_base 15: mod_base = OTHER; note = 2'-fluoro uridine
  modified_base 16: mod_base = OTHER; note = 2'O-methyl adenosine
  modified_base 17: mod_base = OTHER; note = 2'-fluoro cytidine
  modified_base 18: mod_base = OTHER; note = 2'O-methyl guanosine
  modified_base 19: mod_base = OTHER; note = 2'-fluoro adenosine phosphorothioate
  modified_base 20: mod_base = OTHER; note = 2'O-methyl uridine phosphorothioate
  modified_base 21: mod_base = OTHER; note = 2'O-methyl uridine
ccttctatggggagtacgatt

SEQ ID NO: 1065 - RNA, 21 nt, synthetic construct
  source 1..21: mol_type = other RNA
  modified_base 1: mod_base = OTHER; note = 2'-fluoro uridine phosphorothioate
  modified_base 2: mod_base = OTHER; note = 2'O-methyl uridine phosphorothioate
  modified_base 3: mod_base = OTHER; note = 2'-fluoro cytidine
  modified_base 4: mod_base = OTHER; note = 2'O-methyl uridine
  modified_base 5: mod_base = OTHER; note = 2'-fluoro adenosine
  modified_base 6: mod_base = OTHER; note = 2'O-methyl uridine
  modified_base 7: mod_base = OTHER; note = 2'-fluoro guanosine
  modified_base 8: mod_base = OTHER; note = 2'O-methyl guanosine
  modified_base 9: mod_base = OTHER; note = 2'-fluoro guanosine
  modified_base 10: mod_base = OTHER; note = 2'O-methyl guanosine
  modified_base 11: mod_base = OTHER; note = 2'-fluoro adenosine
  modified_base 12: mod_base = OTHER; note = 2'O-methyl guanosine
  modified_base 13: mod_base = OTHER; note = 2'-fluoro uridine
  modified_base 14: mod_base = OTHER; note = 2'O-methyl adenosine
  modified_base 15: mod_base = OTHER; note = 2'-fluoro cytidine
  modified_base 16: mod_base = OTHER; note = 2'O-methyl guanosine
  modified_base 17: mod_base = OTHER; note = 2'-fluoro adenosine
  modified_base 18: mod_base = OTHER; note = 2'O-methyl cytidine
  modified_base 19: mod_base = OTHER; note = 2'-fluoro adenosine phosphorothioate
  modified_base 20: mod_base = OTHER; note = 2'O-methyl uridine phosphorothioate
  modified_base 21: mod_base = OTHER; note = 2'O-methyl uridine
ttctatggggagtacgacatt

SEQ ID NO: 1066 - RNA, 21 nt, synthetic construct
  source 1..21: mol_type = other RNA
  modified_base 1: mod_base = OTHER; note = 2'-fluoro uridine phosphorothioate
  modified_base 2: mod_base = OTHER; note = 2'O-methyl cytidine phosphorothioate
  modified_base 3: mod_base = OTHER; note = 2'-fluoro uridine
  modified_base 4: mod_base = OTHER; note = 2'O-methyl adenosine
  modified_base 5: mod_base = OTHER; note = 2'-fluoro uridine
  modified_base 6: mod_base = OTHER; note = 2'O-methyl guanosine
  modified_base 7: mod_base = OTHER; note = 2'-fluoro guanosine
  modified_base 8: mod_base = OTHER; note = 2'O-methyl guanosine
  modified_base 9: mod_base = OTHER; note = 2'-fluoro guanosine
  modified_base 10: mod_base = OTHER; note = 2'O-methyl adenosine
  modified_base 11: mod_base = OTHER; note = 2'-fluoro guanosine
  modified_base 12: mod_base = OTHER; note = 2'O-methyl uridine
  modified_base 13: mod_base = OTHER; note = 2'-fluoro adenosine
  modified_base 14: mod_base = OTHER; note = 2'O-methyl cytidine
  modified_base 15: mod_base = OTHER; note = 2'-fluoro guanosine
  modified_base 16: mod_base = OTHER; note = 2'O-methyl adenosine
  modified_base 17: mod_base = OTHER; note = 2'-fluoro cytidine
  modified_base 18: mod_base = OTHER; note = 2'O-methyl adenosine
  modified_base 19: mod_base = OTHER; note = 2'-fluoro uridine phosphorothioate
  modified_base 20: mod_base = OTHER; note = 2'O-methyl uridine phosphorothioate
  modified_base 21: mod_base = OTHER; note = 2'O-methyl uridine
tctatggggagtacgacattt

SEQ ID NO: 1067 - RNA, 21 nt, synthetic construct
  source 1..21: mol_type = other RNA
  modified_base 1: mod_base = OTHER; note = 2'-fluoro cytidine phosphorothioate
  modified_base 2: mod_base = OTHER; note = 2'O-methyl uridine phosphorothioate
  modified_base 3: mod_base = OTHER; note = 2'-fluoro adenosine
  modified_base 4: mod_base = OTHER; note = 2'O-methyl uridine
  modified_base 5: mod_base = OTHER; note = 2'-fluoro guanosine
  modified_base 6: mod_base = OTHER; note = 2'O-methyl guanosine
  modified_base 7: mod_base = OTHER; note = 2'-fluoro guanosine
  modified_base 8: mod_base = OTHER; note = 2'O-methyl guanosine
  modified_base 9: mod_base = OTHER; note = 2'-fluoro adenosine
  modified_base 10: mod_base = OTHER; note = 2'O-methyl guanosine
  modified_base 11: mod_base = OTHER; note = 2'-fluoro uridine
  modified_base 12: mod_base = OTHER; note = 2'O-methyl adenosine
  modified_base 13: mod_base = OTHER; note = 2'-fluoro cytidine
  modified_base 14: mod_base = OTHER; note = 2'O-methyl guanosine
  modified_base 15: mod_base = OTHER; note = 2'-fluoro adenosine
  modified_base 16: mod_base = OTHER; note = 2'O-methyl cytidine
  modified_base 17: mod_base = OTHER; note = 2'-fluoro adenosine
  modified_base 18: mod_base = OTHER; note = 2'O-methyl uridine
  modified_base 19: mod_base = OTHER; note = 2'-fluoro cytidine phosphorothioate
  modified_base 20: mod_base = OTHER; note = 2'O-methyl uridine phosphorothioate
  modified_base 21: mod_base = OTHER; note = 2'O-methyl uridine
ctatggggagtacgacatctt

SEQ ID NO: 1068 - RNA, 21 nt, synthetic construct
  source 1..21: mol_type = other RNA
  modified_base 1: mod_base = OTHER; note = 2'-fluoro uridine phosphorothioate
  modified_base 2: mod_base = OTHER; note = 2'O-methyl adenosine phosphorothioate
  modified_base 3: mod_base = OTHER; note = 2'-fluoro uridine
  modified_base 4: mod_base = OTHER; note = 2'O-methyl guanosine
  modified_base 5: mod_base = OTHER; note = 2'-fluoro guanosine
  modified_base 6: mod_base = OTHER; note = 2'O-methyl guanosine
  modified_base 7: mod_base = OTHER; note = 2'-fluoro guanosine
  modified_base 8: mod_base = OTHER; note = 2'O-methyl adenosine
  modified_base 9: mod_base = OTHER; note = 2'-fluoro guanosine
  modified_base 10: mod_base = OTHER; note = 2'O-methyl uridine
  modified_base 11: mod_base = OTHER; note = 2'-fluoro adenosine
  modified_base 12: mod_base = OTHER; note = 2'O-methyl cytidine
  modified_base 13: mod_base = OTHER; note = 2'-fluoro guanosine
  modified_base 14: mod_base = OTHER; note = 2'O-methyl adenosine
  modified_base 15: mod_base = OTHER; note = 2'-fluoro cytidine
  modified_base 16: mod_base = OTHER; note = 2'O-methyl adenosine
  modified_base 17: mod_base = OTHER; note = 2'-fluoro uridine
  modified_base 18: mod_base = OTHER; note = 2'O-methyl cytidine
  modified_base 19: mod_base = OTHER; note = 2'-fluoro uridine phosphorothioate
  modified_base 20: mod_base = OTHER; note = 2'O-methyl uridine phosphorothioate
  modified_base 21: mod_base = OTHER; note = 2'O-methyl uridine
tatggggagtacgacatcttt

SEQ ID NO: 1069 - RNA, 21 nt, synthetic construct
  source 1..21: mol_type = other RNA
  modified_base 1: mod_base = OTHER; note = 2'-fluoro uridine phosphorothioate
  modified_base 2: mod_base = OTHER; note = 2'O-methyl adenosine phosphorothioate
  modified_base 3: mod_base = OTHER; note = 2'-fluoro cytidine
  modified_base 4: mod_base = OTHER; note = 2'O-methyl guanosine
  modified_base 5: mod_base = OTHER; note = 2'-fluoro adenosine
  modified_base 6: mod_base = OTHER; note = 2'O-methyl cytidine
  modified_base 7: mod_base = OTHER; note = 2'-fluoro adenosine
  modified_base 8: mod_base = OTHER; note = 2'O-methyl uridine
  modified_base 9: mod_base = OTHER; note = 2'-fluoro cytidine
  modified_base 10: mod_base = OTHER; note = 2'O-methyl uridine
  modified_base 11: mod_base = OTHER; note = 2'-fluoro guanosine
  modified_base 12: mod_base = OTHER; note = 2'O-methyl cytidine
  modified_base 13: mod_base = OTHER; note = 2'-fluoro cytidine
  modified_base 14: mod_base = OTHER; note = 2'O-methyl cytidine
  modified_base 15: mod_base = OTHER; note = 2'-fluoro uridine
  modified_base 16: mod_base = OTHER; note = 2'O-methyl adenosine
  modified_base 17: mod_base = OTHER; note = 2'-fluoro adenosine
  modified_base 18: mod_base = OTHER; note = 2'O-methyl adenosine
  modified_base 19: mod_base = OTHER; note = 2'-fluoro guanosine phosphorothioate
  modified_base 20: mod_base = OTHER; note = 2'O-methyl uridine phosphorothioate
  modified_base 21: mod_base = OTHER; note = 2'O-methyl uridine
tacgacatctgccctaaagtt

SEQ ID NO: 1070 - RNA, 21 nt, synthetic construct
  source 1..21: mol_type = other RNA
  modified_base 1: mod_base = OTHER; note = 2'-fluoro adenosine phosphorothioate
  modified_base 2: mod_base = OTHER; note = 2'O-methyl cytidine phosphorothioate
  modified_base 3: mod_base = OTHER; note = 2'-fluoro guanosine
  modified_base 4: mod_base = OTHER; note = 2'O-methyl adenosine
  modified_base 5: mod_base = OTHER; note = 2'-fluoro cytidine
  modified_base 6: mod_base = OTHER; note = 2'O-methyl adenosine
  modified_base 7: mod_base = OTHER; note = 2'-fluoro uridine
  modified_base 8: mod_base = OTHER; note = 2'O-methyl cytidine
  modified_base 9: mod_base = OTHER; note = 2'-fluoro uridine
  modified_base 10: mod_base = OTHER; note = 2'O-methyl guanosine
  modified_base 11: mod_base = OTHER; note = 2'-fluoro cytidine
  modified_base 12: mod_base = OTHER; note = 2'O-methyl cytidine
  modified_base 13: mod_base = OTHER; note = 2'-fluoro cytidine
  modified_base 14: mod_base = OTHER; note = 2'O-methyl uridine
  modified_base 15: mod_base = OTHER; note = 2'-fluoro adenosine
  modified_base 16: mod_base = OTHER; note = 2'O-methyl adenosine
  modified_base 17: mod_base = OTHER; note = 2'-fluoro adenosine
  modified_base 18: mod_base = OTHER; note = 2'O-methyl guanosine
  modified_base 19: mod_base = OTHER; note = 2'-fluoro uridine phosphorothioate
  modified_base 20: mod_base = OTHER; note = 2'O-methyl uridine phosphorothioate
  modified_base 21: mod_base = OTHER; note = 2'O-methyl uridine
acgacatctgccctaaagttt

SEQ ID NO: 1071 - RNA, 21 nt, synthetic construct
  source 1..21: mol_type = other RNA
  modified_base 1: mod_base = OTHER; note = 2'-fluoro cytidine phosphorothioate
  modified_base 2: mod_base = OTHER; note = 2'O-methyl guanosine phosphorothioate
  modified_base 3: mod_base = OTHER; note = 2'-fluoro adenosine
  modified_base 4: mod_base = OTHER; note = 2'O-methyl cytidine
  modified_base 5: mod_base = OTHER; note = 2'-fluoro adenosine
  modified_base 6: mod_base = OTHER; note = 2'O-methyl uridine
  modified_base 7: mod_base = OTHER; note = 2'-fluoro cytidine
  modified_base 8: mod_base = OTHER; note = 2'O-methyl uridine
  modified_base 9: mod_base = OTHER; note = 2'-fluoro guanosine
  modified_base 10: mod_base = OTHER; note = 2'O-methyl cytidine
  modified_base 11: mod_base = OTHER; note = 2'-fluoro cytidine
  modified_base 12: mod_base = OTHER; note = 2'O-methyl cytidine
  modified_base 13: mod_base = OTHER; note = 2'-fluoro uridine
  modified_base 14: mod_base = OTHER; note = 2'O-methyl adenosine
  modified_base 15: mod_base = OTHER; note = 2'-fluoro adenosine
  modified_base 16: mod_base = OTHER; note = 2'O-methyl adenosine
  modified_base 17: mod_base = OTHER; note = 2'-fluoro guanosine
  modified_base 18: mod_base = OTHER; note = 2'O-methyl uridine
  modified_base 19: mod_base = OTHER; note = 2'-fluoro cytidine phosphorothioate
  modified_base 20: mod_base = OTHER; note = 2'O-methyl uridine phosphorothioate
  modified_base 21: mod_base = OTHER; note = 2'O-methyl uridine
cgacatctgccctaaagtctt

SEQ ID NO: 1072 - RNA, 21 nt, synthetic construct
  source 1..21: mol_type = other RNA
  modified_base 1: mod_base = OTHER; note = 2'-fluoro guanosine phosphorothioate
  modified_base 2: mod_base = OTHER; note = 2'O-methyl adenosine phosphorothioate
  modified_base 3: mod_base = OTHER; note = 2'-fluoro cytidine
  modified_base 4: mod_base = OTHER; note = 2'O-methyl adenosine
  modified_base 5: mod_base = OTHER; note = 2'-fluoro uridine
  modified_base 6: mod_base = OTHER; note = 2'O-methyl cytidine
  modified_base 7: mod_base = OTHER; note = 2'-fluoro uridine
  modified_base 8: mod_base = OTHER; note = 2'O-methyl guanosine
  modified_base 9: mod_base = OTHER; note = 2'-fluoro cytidine
  modified_base 10: mod_base = OTHER; note = 2'O-methyl cytidine
  modified_base 11: mod_base = OTHER; note = 2'-fluoro cytidine
  modified_base 12: mod_base = OTHER; note = 2'O-methyl uridine
  modified_base 13: mod_base = OTHER; note = 2'-fluoro adenosine
  modified_base 14: mod_base = OTHER; note = 2'O-methyl adenosine
  modified_base 15: mod_base = OTHER; note = 2'-fluoro adenosine
  modified_base 16: mod_base = OTHER; note = 2'O-methyl guanosine
  modified_base 17: mod_base = OTHER; note = 2'-fluoro uridine
  modified_base 18: mod_base = OTHER; note = 2'O-methyl cytidine
  modified_base 19: mod_base = OTHER; note = 2'-fluoro adenosine phosphorothioate
  modified_base 20: mod_base = OTHER; note = 2'O-methyl uridine phosphorothioate
  modified_base 21: mod_base = OTHER; note = 2'O-methyl uridine
gacatctgccctaaagtcatt

SEQ ID NO: 1073 - RNA, 21 nt, synthetic construct
  source 1..21: mol_type = other RNA
  modified_base 1: mod_base = OTHER; note = 2'-fluoro adenosine phosphorothioate
  modified_base 2: mod_base = OTHER; note = 2'O-methyl cytidine phosphorothioate
  modified_base 3: mod_base = OTHER; note = 2'-fluoro adenosine
  modified_base 4: mod_base = OTHER; note = 2'O-methyl uridine
  modified_base 5: mod_base = OTHER; note = 2'-fluoro cytidine
  modified_base 6: mod_base = OTHER; note = 2'O-methyl uridine
  modified_base 7: mod_base = OTHER; note = 2'-fluoro guanosine
  modified_base 8: mod_base = OTHER; note = 2'O-methyl cytidine
  modified_base 9: mod_base = OTHER; note = 2'-fluoro cytidine
  modified_base 10: mod_base = OTHER; note = 2'O-methyl cytidine
  modified_base 11: mod_base = OTHER; note = 2'-fluoro uridine
  modified_base 12: mod_base = OTHER; note = 2'O-methyl adenosine
  modified_base 13: mod_base = OTHER; note = 2'-fluoro adenosine
  modified_base 14: mod_base = OTHER; note = 2'O-methyl adenosine
  modified_base 15: mod_base = OTHER; note = 2'-fluoro guanosine
  modified_base 16: mod_base = OTHER; note = 2'O-methyl uridine
  modified_base 17: mod_base = OTHER; note = 2'-fluoro cytidine
  modified_base 18: mod_base = OTHER; note = 2'O-methyl adenosine
  modified_base 19: mod_base = OTHER; note = 2'-fluoro adenosine phosphorothioate
  modified_base 20: mod_base = OTHER; note = 2'O-methyl uridine phosphorothioate
  modified_base 21: mod_base = OTHER; note = 2'O-methyl uridine
acatctgccctaaagtcaatt

SEQ ID NO: 1074 - RNA, 21 nt, synthetic construct
  source 1..21: mol_type = other RNA
  modified_base 1: mod_base = OTHER; note = 2'-fluoro cytidine phosphorothioate
  modified_base 2: mod_base = OTHER; note = 2'O-methyl adenosine phosphorothioate
  modified_base 3: mod_base = OTHER; note = 2'-fluoro uridine
  modified_base 4: mod_base = OTHER; note = 2'O-methyl cytidine
  modified_base 5: mod_base = OTHER; note = 2'-fluoro uridine
  modified_base 6: mod_base = OTHER; note = 2'O-methyl guanosine
  modified_base 7: mod_base = OTHER; note = 2'-fluoro cytidine
  modified_base 8: mod_base = OTHER; note = 2'O-methyl cytidine
  modified_base 9: mod_base = OTHER; note = 2'-fluoro cytidine
  modified_base 10: mod_base = OTHER; note = 2'O-methyl uridine
  modified_base 11: mod_base = OTHER; note = 2'-fluoro adenosine
  modified_base 12: mod_base = OTHER; note = 2'O-methyl adenosine
  modified_base 13: mod_base = OTHER; note = 2'-fluoro adenosine
  modified_base 14: mod_base = OTHER; note = 2'O-methyl guanosine
  modified_base 15: mod_base = OTHER; note = 2'-fluoro uridine
  modified_base 16: mod_base = OTHER; note = 2'O-methyl cytidine
  modified_base 17: mod_base = OTHER; note = 2'-fluoro adenosine
  modified_base 18: mod_base = OTHER; note = 2'O-methyl adenosine
  modified_base 19: mod_base = OTHER; note = 2'-fluoro guanosine phosphorothioate
  modified_base 20: mod_base = OTHER; note = 2'O-methyl uridine phosphorothioate
  modified_base 21: mod_base = OTHER; note = 2'O-methyl uridine
catctgccctaaagtcaagtt

SEQ ID NO: 1075 - RNA, 21 nt, synthetic construct
  source 1..21: mol_type = other RNA
  modified_base 1: mod_base = OTHER; note = 2'-fluoro adenosine phosphorothioate
  modified_base 2: mod_base = OTHER; note = 2'O-methyl uridine phosphorothioate
  modified_base 3: mod_base = OTHER; note = 2'-fluoro cytidine
  modified_base 4: mod_base = OTHER; note = 2'O-methyl uridine
  modified_base 5: mod_base = OTHER; note = 2'-fluoro guanosine
  modified_base 6: mod_base = OTHER; note = 2'O-methyl cytidine
  modified_base 7: mod_base = OTHER; note = 2'-fluoro cytidine
  modified_base 8: mod_base = OTHER; note = 2'O-methyl cytidine
  modified_base 9: mod_base = OTHER; note = 2'-fluoro uridine
  modified_base 10: mod_base = OTHER; note = 2'O-methyl adenosine
  modified_base 11: mod_base = OTHER; note = 2'-fluoro adenosine
  modified_base 12: mod_base = OTHER; note = 2'O-methyl adenosine
  modified_base 13: mod_base = OTHER; note = 2'-fluoro guanosine
  modified_base 14: mod_base = OTHER; note = 2'O-methyl uridine
  modified_base 15: mod_base = OTHER; note = 2'-fluoro cytidine
  modified_base 16: mod_base = OTHER; note = 2'O-methyl adenosine
  modified_base 17: mod_base = OTHER; note = 2'-fluoro adenosine
  modified_base 18: mod_base = OTHER; note = 2'O-methyl guanosine
  modified_base 19: mod_base = OTHER; note = 2'-fluoro uridine phosphorothioate
  modified_base 20: mod_base = OTHER; note = 2'O-methyl uridine phosphorothioate
  modified_base 21: mod_base = OTHER; note = 2'O-methyl uridine
atctgccctaaagtcaagttt

SEQ ID NO: 1076 - RNA, 21 nt, synthetic construct
  source 1..21: mol_type = other RNA
  modified_base 1: mod_base = OTHER; note = 2'-fluoro cytidine phosphorothioate
  modified_base 2: mod_base = OTHER; note = 2'O-methyl cytidine phosphorothioate
  modified_base 3: mod_base = OTHER; note = 2'-fluoro cytidine
  modified_base 4: mod_base = OTHER; note = 2'O-methyl uridine
  modified_base 5: mod_base = OTHER; note = 2'-fluoro adenosine
  modified_base 6: mod_base = OTHER; note = 2'O-methyl adenosine
  modified_base 7: mod_base = OTHER; note = 2'-fluoro adenosine
  modified_base 8: mod_base = OTHER; note = 2'O-methyl guanosine
  modified_base 9: mod_base = OTHER; note = 2'-fluoro uridine
  modified_base 10: mod_base = OTHER; note = 2'O-methyl cytidine
  modified_base 11: mod_base = OTHER; note = 2'-fluoro adenosine
  modified_base 12: mod_base = OTHER; note = 2'O-methyl adenosine
  modified_base 13: mod_base = OTHER; note = 2'-fluoro guanosine
  modified_base 14: mod_base = OTHER; note = 2'O-methyl uridine
  modified_base 15: mod_base = OTHER; note = 2'-fluoro cytidine
  modified_base 16: mod_base = OTHER; note = 2'O-methyl cytidine
  modified_base 17: mod_base = OTHER; note = 2'-fluoro adenosine
  modified_base 18: mod_base = OTHER; note = 2'O-methyl cytidine
  modified_base 19: mod_base = OTHER; note = 2'-fluoro guanosine phosphorothioate
  modified_base 20: mod_base = OTHER; note = 2'O-methyl uridine phosphorothioate
  modified_base 21: mod_base = OTHER; note = 2'O-methyl uridine
ccctaaagtcaagtccacgtt

SEQ ID NO: 1077 - RNA, 21 nt, synthetic construct
  source 1..21: mol_type = other RNA
  modified_base 1: mod_base = OTHER; note = 2'-fluoro cytidine phosphorothioate
  modified_base 2: mod_base = OTHER; note = 2'O-methyl cytidine phosphorothioate
  modified_base 3: mod_base = OTHER; note = 2'-fluoro uridine
  modified_base 4: mod_base = OTHER; note = 2'O-methyl adenosine
  modified_base 5: mod_base = OTHER; note = 2'-fluoro adenosine
  modified_base 6: mod_base = OTHER; note = 2'O-methyl adenosine
  modified_base 7: mod_base = OTHER; note = 2'-fluoro guanosine
  modified_base 8: mod_base = OTHER; note = 2'O-methyl uridine
  modified_base 9: mod_base = OTHER; note = 2'-fluoro cytidine
  modified_base 10: mod_base = OTHER; note = 2'O-methyl adenosine
  modified_base 11: mod_base = OTHER; note = 2'-fluoro adenosine
  modified_base 12: mod_base = OTHER; note = 2'O-methyl guanosine
  modified_base 13: mod_base = OTHER; note = 2'-fluoro uridine
  modified_base 14: mod_base = OTHER; note = 2'O-methyl cytidine
  modified_base 15: mod_base = OTHER; note = 2'-fluoro cytidine
  modified_base 16: mod_base = OTHER; note = 2'O-methyl adenosine
  modified_base 17: mod_base = OTHER; note = 2'-fluoro cytidine
  modified_base 18: mod_base = OTHER; note = 2'O-methyl guanosine
  modified_base 19: mod_base = OTHER; note = 2'-fluoro adenosine phosphorothioate
  modified_base 20: mod_base = OTHER; note = 2'O-methyl uridine phosphorothioate
  modified_base 21: mod_base = OTHER; note = 2'O-methyl uridine
cctaaagtcaagtccacgatt

SEQ ID NO: 1078 - RNA, 21 nt, synthetic construct
  source 1..21: mol_type = other RNA
  modified_base 1: mod_base = OTHER; note = 2'-fluoro uridine phosphorothioate
  modified_base 2: mod_base = OTHER; note = 2'O-methyl adenosine phosphorothioate
  modified_base 3: mod_base = OTHER; note = 2'-fluoro adenosine
  modified_base 4: mod_base = OTHER; note = 2'O-methyl adenosine
  modified_base 5: mod_base = OTHER; note = 2'-fluoro guanosine
  modified_base 6: mod_base = OTHER; note = 2'O-methyl uridine
  modified_base 7: mod_base = OTHER; note = 2'-fluoro cytidine
  modified_base 8: mod_base = OTHER; note = 2'O-methyl adenosine
  modified_base 9: mod_base = OTHER; note = 2'-fluoro adenosine
  modified_base 10: mod_base = OTHER; note = 2'O-methyl guanosine
  modified_base 11: mod_base = OTHER; note = 2'-fluoro uridine
  modified_base 12: mod_base = OTHER; note = 2'O-methyl cytidine
  modified_base 13: mod_base = OTHER; note = 2'-fluoro cytidine
  modified_base 14: mod_base = OTHER; note = 2'O-methyl adenosine
  modified_base 15: mod_base = OTHER; note = 2'-fluoro cytidine
  modified_base 16: mod_base = OTHER; note = 2'O-methyl guanosine
  modified_base 17: mod_base = OTHER; note = 2'-fluoro adenosine
  modified_base 18: mod_base = OTHER; note = 2'O-methyl adenosine
  modified_base 19: mod_base = OTHER; note = 2'-fluoro cytidine phosphorothioate
  modified_base 20: mod_base = OTHER; note = 2'O-methyl uridine phosphorothioate
  modified_base 21: mod_base = OTHER; note = 2'O-methyl uridine
taaagtcaagtccacgaactt

SEQ ID NO: 1079 - RNA, 21 nt, synthetic construct
  source 1..21: mol_type = other RNA
  modified_base 1: mod_base = OTHER; note = 2'-fluoro adenosine phosphorothioate
  modified_base 2: mod_base = OTHER; note = 2'O-methyl adenosine phosphorothioate
  modified_base 3: mod_base = OTHER; note = 2'-fluoro adenosine
  modified_base 4: mod_base = OTHER; note = 2'O-methyl guanosine
  modified_base 5: mod_base = OTHER; note = 2'-fluoro uridine
  modified_base 6: mod_base = OTHER; note = 2'O-methyl cytidine
  modified_base 7: mod_base = OTHER; note = 2'-fluoro adenosine
  modified_base 8: mod_base = OTHER; note = 2'O-methyl adenosine
  modified_base 9: mod_base = OTHER; note = 2'-fluoro guanosine
  modified_base 10: mod_base = OTHER; note = 2'O-methyl uridine
  modified_base 11: mod_base = OTHER; note = 2'-fluoro cytidine
  modified_base 12: mod_base = OTHER; note = 2'O-methyl cytidine
  modified_base 13: mod_base = OTHER; note = 2'-fluoro adenosine
  modified_base 14: mod_base = OTHER; note = 2'O-methyl cytidine
  modified_base 15: mod_base = OTHER; note = 2'-fluoro guanosine
  modified_base 16: mod_base = OTHER; note = 2'O-methyl adenosine
  modified_base 17: mod_base = OTHER; note = 2'-fluoro adenosine
  modified_base 18: mod_base = OTHER; note = 2'O-methyl cytidine
  modified_base 19: mod_base = OTHER; note = 2'-fluoro uridine phosphorothioate
  modified_base 20: mod_base = OTHER; note = 2'O-methyl uridine phosphorothioate
  modified_base 21: mod_base = OTHER; note = 2'O-methyl uridine
aaagtcaagtccacgaacttt

SEQ ID NO: 1080 - RNA, 21 nt, synthetic construct
  source 1..21: mol_type = other RNA
  modified_base 1: mod_base = OTHER; note = 2'-fluoro adenosine phosphorothioate
  modified_base 2: mod_base = OTHER; note = 2'O-methyl adenosine phosphorothioate
  modified_base 3: mod_base = OTHER; note = 2'-fluoro guanosine
  modified_base 4: mod_base = OTHER; note = 2'O-methyl uridine
  modified_base 5: mod_base = OTHER; note = 2'-fluoro cytidine
  modified_base 6: mod_base = OTHER; note = 2'O-methyl adenosine
  modified_base 7: mod_base = OTHER; note = 2'-fluoro adenosine
  modified_base 8: mod_base = OTHER; note = 2'O-methyl guanosine
  modified_base 9: mod_base = OTHER; note = 2'-fluoro uridine
  modified_base 10: mod_base = OTHER; note = 2'O-methyl cytidine
  modified_base 11: mod_base = OTHER; note = 2'-fluoro cytidine
  modified_base 12: mod_base = OTHER; note = 2'O-methyl adenosine
  modified_base 13: mod_base = OTHER; note = 2'-fluoro cytidine
  modified_base 14: mod_base = OTHER; note = 2'O-methyl guanosine
  modified_base 15: mod_base = OTHER; note = 2'-fluoro adenosine
  modified_base 16: mod_base = OTHER; note = 2'O-methyl adenosine
  modified_base 17: mod_base = OTHER; note = 2'-fluoro cytidine
  modified_base 18: mod_base = OTHER; note = 2'O-methyl uridine
  modified_base 19: mod_base = OTHER; note = 2'-fluoro uridine phosphorothioate
  modified_base 20: mod_base = OTHER; note = 2'O-methyl uridine phosphorothioate
  modified_base 21: mod_base = OTHER; note = 2'O-methyl uridine
aagtcaagtccacgaactttt

SEQ ID NO: 1081 - RNA, 21 nt, synthetic construct
  source 1..21: mol_type = other RNA
  modified_base 1: mod_base = OTHER; note = 2'-fluoro adenosine phosphorothioate
  modified_base 2: mod_base = OTHER; note = 2'O-methyl guanosine phosphorothioate
  modified_base 3: mod_base = OTHER; note = 2'-fluoro uridine
  modified_base 4: mod_base = OTHER; note = 2'O-methyl cytidine
  modified_base 5: mod_base = OTHER; note = 2'-fluoro adenosine
  modified_base 6: mod_base = OTHER; note = 2'O-methyl adenosine
  modified_base 7: mod_base = OTHER; note = 2'-fluoro guanosine
  modified_base 8: mod_base = OTHER; note = 2'O-methyl uridine
  modified_base 9: mod_base = OTHER; note = 2'-fluoro cytidine
  modified_base 10: mod_base = OTHER; note = 2'O-methyl cytidine
  modified_base 11: mod_base = OTHER; note = 2'-fluoro adenosine
  modified_base 12: mod_base = OTHER; note = 2'O-methyl cytidine
  modified_base 13: mod_base = OTHER; note = 2'-fluoro guanosine
  modified_base 14: mod_base = OTHER; note = 2'O-methyl adenosine
  modified_base 15: mod_base = OTHER; note = 2'-fluoro adenosine
  modified_base 16: mod_base = OTHER; note = 2'O-methyl cytidine
  modified_base 17: mod_base = OTHER; note = 2'-fluoro uridine
  modified_base 18: mod_base = OTHER; note = 2'O-methyl uridine
  modified_base 19: mod_base = OTHER; note = 2'-fluoro uridine phosphorothioate
  modified_base 20: mod_base = OTHER; note = 2'O-methyl uridine phosphorothioate
  modified_base 21: mod_base = OTHER; note = 2'O-methyl uridine
agtcaagtccacgaacttttt

SEQ ID NO: 1082 - RNA, 21 nt, synthetic construct
  source 1..21: mol_type = other RNA
  modified_base 1: mod_base = OTHER; note = 2'-fluoro guanosine phosphorothioate
  modified_base 2: mod_base = OTHER; note = 2'O-methyl uridine phosphorothioate
  modified_base 3: mod_base = OTHER; note = 2'-fluoro cytidine
  modified_base 4: mod_base = OTHER; note = 2'O-methyl adenosine
  modified_base 5: mod_base = OTHER; note = 2'-fluoro adenosine
  modified_base 6: mod_base = OTHER; note = 2'O-methyl guanosine
  modified_base 7: mod_base = OTHER; note = 2'-fluoro uridine
  modified_base 8: mod_base = OTHER; note = 2'O-methyl cytidine
  modified_base 9: mod_base = OTHER; note = 2'-fluoro cytidine
  modified_base 10: mod_base = OTHER; note = 2'O-methyl adenosine
  modified_base 11: mod_base = OTHER; note = 2'-fluoro cytidine
  modified_base 12: mod_base = OTHER; note = 2'O-methyl guanosine
  modified_base 13: mod_base = OTHER; note = 2'-fluoro adenosine
  modified_base 14: mod_base = OTHER; note = 2'O-methyl adenosine
  modified_base 15: mod_base = OTHER; note = 2'-fluoro cytidine
  modified_base 16: mod_base = OTHER; note = 2'O-methyl uridine
  modified_base 17: mod_base = OTHER; note = 2'-fluoro uridine
  modified_base 18: mod_base = OTHER; note = 2'O-methyl uridine
  modified_base 19: mod_base = OTHER; note = 2'-fluoro cytidine phosphorothioate
  modified_base 20: mod_base = OTHER; note = 2'O-methyl uridine phosphorothioate
  modified_base 21: mod_base = OTHER; note = 2'O-methyl uridine
gtcaagtccacgaactttctt

SEQ ID NO: 1083 - RNA, 21 nt, synthetic construct
  source 1..21: mol_type = other RNA
  modified_base 1: mod_base = OTHER; note = 2'-fluoro uridine phosphorothioate
  modified_base 2: mod_base = OTHER; note = 2'O-methyl cytidine phosphorothioate
  modified_base 3: mod_base = OTHER; note = 2'-fluoro adenosine
  modified_base 4: mod_base = OTHER; note = 2'O-methyl adenosine
  modified_base 5: mod_base = OTHER; note = 2'-fluoro guanosine
  modified_base 6: mod_base = OTHER; note = 2'O-methyl uridine
  modified_base 7: mod_base = OTHER; note = 2'-fluoro cytidine
  modified_base 8: mod_base = OTHER; note = 2'O-methyl cytidine
  modified_base 9: mod_base = OTHER; note = 2'-fluoro adenosine
  modified_base 10: mod_base = OTHER; note = 2'O-methyl cytidine
  modified_base 11: mod_base = OTHER; note = 2'-fluoro guanosine
  modified_base 12: mod_base = OTHER; note = 2'O-methyl adenosine
  modified_base 13: mod_base = OTHER; note = 2'-fluoro adenosine
  modified_base 14: mod_base = OTHER; note = 2'O-methyl cytidine
  modified_base 15: mod_base = OTHER; note = 2'-fluoro uridine
  modified_base 16: mod_base = OTHER; note = 2'O-methyl uridine
  modified_base 17: mod_base = OTHER; note = 2'-fluoro uridine
  modified_base 18: mod_base = OTHER; note = 2'O-methyl cytidine
  modified_base 19: mod_base = OTHER; note = 2'-fluoro uridine phosphorothioate
  modified_base 20: mod_base = OTHER; note = 2'O-methyl uridine phosphorothioate
  modified_base 21: mod_base = OTHER; note = 2'O-methyl uridine
tcaagtccacgaactttcttt

SEQ ID NO: 1084 - RNA, 21 nt, synthetic construct
  source 1..21: mol_type = other RNA
  modified_base 1: mod_base = OTHER; note = 2'-fluoro cytidine phosphorothioate
  modified_base 2: mod_base = OTHER; note = 2'O-methyl adenosine phosphorothioate
  modified_base 3: mod_base = OTHER; note = 2'-fluoro adenosine
  modified_base 4: mod_base = OTHER; note = 2'O-methyl guanosine
  modified_base 5: mod_base = OTHER; note = 2'-fluoro uridine
  modified_base 6: mod_base = OTHER; note = 2'O-methyl cytidine
  modified_base 7: mod_base = OTHER; note = 2'-fluoro cytidine
  modified_base 8: mod_base = OTHER; note = 2'O-methyl adenosine
  modified_base 9: mod_base = OTHER; note = 2'-fluoro cytidine
  modified_base 10: mod_base = OTHER; note = 2'O-methyl guanosine
  modified_base 11: mod_base = OTHER; note = 2'-fluoro adenosine
  modified_base 12: mod_base = OTHER; note = 2'O-methyl adenosine
  modified_base 13: mod_base = OTHER; note = 2'-fluoro cytidine
  modified_base 14: mod_base = OTHER; note = 2'O-methyl uridine
  modified_base 15: mod_base = OTHER; note = 2'-fluoro uridine
  modified_base 16: mod_base = OTHER; note = 2'O-methyl uridine
  modified_base 17: mod_base = OTHER; note = 2'-fluoro cytidine
  modified_base 18: mod_base = OTHER; note = 2'O-methyl uridine
  modified_base 19: mod_base = OTHER; note = 2'-fluoro uridine phosphorothioate
  modified_base 20: mod_base = OTHER; note = 2'O-methyl uridine phosphorothioate
  modified_base 21: mod_base = OTHER; note = 2'O-methyl uridine
caagtccacgaactttctttt

SEQ ID NO: 1085 - RNA, 21 nt, synthetic construct
  source 1..21: mol_type = other RNA
  modified_base 1: mod_base = OTHER; note = 2'-fluoro adenosine phosphorothioate
  modified_base 2: mod_base = OTHER; note = 2'O-methyl adenosine phosphorothioate
  modified_base 3: mod_base = OTHER; note = 2'-fluoro guanosine
  modified_base 4: mod_base = OTHER; note = 2'O-methyl uridine
  modified_base 5: mod_base = OTHER; note = 2'-fluoro cytidine
  modified_base 6: mod_base = OTHER; note = 2'O-methyl cytidine
  modified_base 7: mod_base = OTHER; note = 2'-fluoro adenosine
  modified_base 8: mod_base = OTHER; note = 2'O-methyl cytidine
  modified_base 9: mod_base = OTHER; note = 2'-fluoro guanosine
  modified_base 10: mod_base = OTHER; note = 2'O-methyl adenosine
  modified_base 11: mod_base = OTHER; note = 2'-fluoro adenosine
  modified_base 12: mod_base = OTHER; note = 2'O-methyl cytidine
  modified_base 13: mod_base = OTHER; note = 2'-fluoro uridine
  modified_base 14: mod_base = OTHER; note = 2'O-methyl uridine
  modified_base 15: mod_base = OTHER; note = 2'-fluoro uridine
  modified_base 16: mod_base = OTHER; note = 2'O-methyl cytidine
  modified_base 17: mod_base = OTHER; note = 2'-fluoro uridine
  modified_base 18: mod_base = OTHER; note = 2'O-methyl uridine
  modified_base 19: mod_base = OTHER; note = 2'-fluoro cytidine phosphorothioate
  modified_base 20: mod_base = OTHER; note = 2'O-methyl uridine phosphorothioate
  modified_base 21: mod_base = OTHER; note = 2'O-methyl uridine
aagtccacgaactttcttctt

SEQ ID NO: 1086 - RNA, 21 nt, synthetic construct
  source 1..21: mol_type = other RNA
  modified_base 1: mod_base = OTHER; note = 2'-fluoro adenosine phosphorothioate
  modified_base 2: mod_base = OTHER; note = 2'O-methyl guanosine phosphorothioate
  modified_base 3: mod_base = OTHER; note = 2'-fluoro uridine
  modified_base 4: mod_base = OTHER; note = 2'O-methyl cytidine
  modified_base 5: mod_base = OTHER; note = 2'-fluoro cytidine
  modified_base 6: mod_base = OTHER; note = 2'O-methyl adenosine
  modified_base 7: mod_base = OTHER; note = 2'-fluoro cytidine
  modified_base 8: mod_base = OTHER; note = 2'O-methyl guanosine
  modified_base 9: mod_base = OTHER; note = 2'-fluoro adenosine
  modified_base 10: mod_base = OTHER; note = 2'O-methyl adenosine
  modified_base 11: mod_base = OTHER; note = 2'-fluoro cytidine
  modified_base 12: mod_base = OTHER; note = 2'O-methyl uridine
  modified_base 13: mod_base = OTHER; note = 2'-fluoro uridine
  modified_base 14: mod_base = OTHER; note = 2'O-methyl uridine
  modified_base 15: mod_base = OTHER; note = 2'-fluoro cytidine
  modified_base 16: mod_base = OTHER; note = 2'O-methyl uridine
  modified_base 17: mod_base = OTHER; note = 2'-fluoro uridine
  modified_base 18: mod_base = OTHER; note = 2'O-methyl cytidine
  modified_base 19: mod_base = OTHER; note = 2'-fluoro adenosine phosphorothioate
  modified_base 20: mod_base = OTHER; note = 2'O-methyl uridine phosphorothioate
  modified_base 21: mod_base = OTHER; note = 2'O-methyl uridine
agtccacgaactttcttcatt

SEQ ID NO: 1087 - RNA, 21 nt, synthetic construct
  source 1..21: mol_type = other RNA
  modified_base 1: mod_base = OTHER; note = 2'-fluoro guanosine phosphorothioate
  modified_base 2: mod_base = OTHER; note = 2'O-methyl uridine phosphorothioate
  modified_base 3: mod_base = OTHER; note = 2'-fluoro cytidine
  modified_base 4: mod_base = OTHER; note = 2'O-methyl cytidine
  modified_base 5: mod_base = OTHER; note = 2'-fluoro adenosine
  modified_base 6: mod_base = OTHER; note = 2'O-methyl cytidine
  modified_base 7: mod_base = OTHER; note = 2'-fluoro guanosine
  modified_base 8: mod_base = OTHER; note = 2'O-methyl adenosine
  modified_base 9: mod_base = OTHER; note = 2'-fluoro adenosine
  modified_base 10: mod_base = OTHER; note = 2'O-methyl cytidine
  modified_base 11: mod_base = OTHER; note = 2'-fluoro uridine
  modified_base 12: mod_base = OTHER; note = 2'O-methyl uridine
  modified_base 13: mod_base = OTHER; note = 2'-fluoro uridine
  modified_base 14: mod_base = OTHER; note = 2'O-methyl cytidine
  modified_base 15: mod_base = OTHER; note = 2'-fluoro uridine
  modified_base 16: mod_base = OTHER; note = 2'O-methyl uridine
  modified_base 17: mod_base = OTHER; note = 2'-fluoro cytidine
  modified_base 18: mod_base = OTHER; note = 2'O-methyl adenosine
  modified_base 19: mod_base = OTHER; note = 2'-fluoro uridine phosphorothioate
  modified_base 20: mod_base = OTHER; note = 2'O-methyl uridine phosphorothioate
  modified_base 21: mod_base = OTHER; note = 2'O-methyl uridine
gtccacgaactttcttcattt

SEQ ID NO: 1088 - RNA, 21 nt, synthetic construct
  source 1..21: mol_type = other RNA
  modified_base 1: mod_base = OTHER; note = 2'-fluoro uridine phosphorothioate
  modified_base 2: mod_base = OTHER; note = 2'O-methyl cytidine phosphorothioate
  modified_base 3: mod_base = OTHER; note = 2'-fluoro cytidine
  modified_base 4: mod_base = OTHER; note = 2'O-methyl adenosine
  modified_base 5: mod_base = OTHER; note = 2'-fluoro cytidine
  modified_base 6: mod_base = OTHER; note = 2'O-methyl guanosine
  modified_base 7: mod_base = OTHER; note = 2'-fluoro adenosine
  modified_base 8: mod_base = OTHER; note = 2'O-methyl adenosine
  modified_base 9: mod_base = OTHER; note = 2'-fluoro cytidine
  modified_base 10: mod_base = OTHER; note = 2'O-methyl uridine
  modified_base 11: mod_base = OTHER; note = 2'-fluoro uridine
  modified_base 12: mod_base = OTHER; note = 2'O-methyl uridine
  modified_base 13: mod_base = OTHER; note = 2'-fluoro cytidine
  modified_base 14: mod_base = OTHER; note = 2'O-methyl uridine
  modified_base 15: mod_base = OTHER; note = 2'-fluoro uridine
  modified_base 16: mod_base = OTHER; note = 2'O-methyl cytidine
  modified_base 17: mod_base = OTHER; note = 2'-fluoro adenosine
  modified_base 18: mod_base = OTHER; note = 2'O-methyl uridine
  modified_base 19: mod_base = OTHER; note = 2'-fluoro guanosine phosphorothioate
  modified_base 20: mod_base = OTHER; note = 2'O-methyl uridine phosphorothioate
  modified_base 21: mod_base = OTHER; note = 2'O-methyl uridine
tccacgaactttcttcatgtt

SEQ ID NO: 1089 - RNA, 21 nt, synthetic construct
  source 1..21: mol_type = other RNA
  modified_base 1: mod_base = OTHER; note = 2'-fluoro cytidine phosphorothioate
  modified_base 2: mod_base = OTHER; note = 2'O-methyl adenosine phosphorothioate
  modified_base 3: mod_base = OTHER; note = 2'-fluoro cytidine
  modified_base 4: mod_base = OTHER; note = 2'O-methyl guanosine
  modified_base 5: mod_base = OTHER; note = 2'-fluoro adenosine
  modified_base 6: mod_base = OTHER; note = 2'O-methyl adenosine
  modified_base 7: mod_base = OTHER; note = 2'-fluoro cytidine
  modified_base 8: mod_base = OTHER; note = 2'O-methyl uridine
  modified_base 9: mod_base = OTHER; note = 2'-fluoro uridine
  modified_base 10: mod_base = OTHER; note = 2'O-methyl uridine
  modified_base 11: mod_base = OTHER; note = 2'-fluoro cytidine
  modified_base 12: mod_base = OTHER; note = 2'O-methyl uridine
  modified_base 13: mod_base = OTHER; note = 2'-fluoro uridine
  modified_base 14: mod_base = OTHER; note = 2'O-methyl cytidine
  modified_base 15: mod_base = OTHER; note = 2'-fluoro adenosine
  modified_base 16: mod_base = OTHER; note = 2'O-methyl uridine
  modified_base 17: mod_base = OTHER; note = 2'-fluoro guanosine
  modified_base 18: mod_base = OTHER; note = 2'O-methyl uridine
  modified_base 19: mod_base = OTHER; note = 2'-fluoro guanosine phosphorothioate
  modified_base 20: mod_base = OTHER; note = 2'O-methyl uridine phosphorothioate
  modified_base 21: mod_base = OTHER; note = 2'O-methyl uridine
cacgaactttcttcatgtgtt

SEQ ID NO: 1090 - RNA, 21 nt, synthetic construct
  source 1..21: mol_type = other RNA
  modified_base 1: mod_base = OTHER; note = 2'-fluoro uridine phosphorothioate
  modified_base 2: mod_base = OTHER; note = 2'O-methyl cytidine phosphorothioate
  modified_base 3: mod_base = OTHER; note = 2'-fluoro adenosine
  modified_base 4: mod_base = OTHER; note = 2'O-methyl cytidine
  modified_base 5: mod_base = OTHER; note = 2'-fluoro cytidine
  modified_base 6: mod_base = OTHER; note = 2'O-methyl adenosine
  modified_base 7: mod_base = OTHER; note = 2'-fluoro adenosine
  modified_base 8: mod_base = OTHER; note = 2'O-methyl guanosine
  modified_base 9: mod_base = OTHER; note = 2'-fluoro cytidine
  modified_base 10: mod_base = OTHER; note = 2'O-methyl uridine
  modified_base 11: mod_base = OTHER; note = 2'-fluoro cytidine
  modified_base 12: mod_base = OTHER; note = 2'O-methyl adenosine
  modified_base 13: mod_base = OTHER; note = 2'-fluoro guanosine
  modified_base 14: mod_base = OTHER; note = 2'O-methyl uridine
  modified_base 15: mod_base = OTHER; note = 2'-fluoro cytidine
  modified_base 16: mod_base = OTHER; note = 2'O-methyl uridine
  modified_base 17: mod_base = OTHER; note = 2'-fluoro adenosine
  modified_base 18: mod_base = OTHER; note = 2'O-methyl cytidine
  modified_base 19: mod_base = OTHER; note = 2'-fluoro guanosine phosphorothioate
  modified_base 20: mod_base = OTHER; note = 2'O-methyl uridine phosphorothioate
  modified_base 21: mod_base = OTHER; note = 2'O-methyl uridine
tcaccaagctcagtctacgtt

SEQ ID NO: 1091 - RNA, 21 nt, synthetic construct
  source 1..21: mol_type = other RNA
  modified_base 1: mod_base = OTHER; note = 2'-fluoro cytidine phosphorothioate
  modified_base 2: mod_base = OTHER; note = 2'O-methyl adenosine phosphorothioate
  modified_base 3: mod_base = OTHER; note = 2'-fluoro cytidine
  modified_base 4: mod_base = OTHER; note = 2'O-methyl cytidine
  modified_base 5: mod_base = OTHER; note = 2'-fluoro adenosine
  modified_base 6: mod_base = OTHER; note = 2'O-methyl adenosine
  modified_base 7: mod_base = OTHER; note = 2'-fluoro guanosine
  modified_base 8: mod_base = OTHER; note = 2'O-methyl cytidine
  modified_base 9: mod_base = OTHER; note = 2'-fluoro uridine
  modified_base 10: mod_base = OTHER; note = 2'O-methyl cytidine
  modified_base 11: mod_base = OTHER; note = 2'-fluoro adenosine
  modified_base 12: mod_base = OTHER; note = 2'O-methyl guanosine
  modified_base 13: mod_base = OTHER; note = 2'-fluoro uridine
  modified_base 14: mod_base = OTHER; note = 2'O-methyl cytidine
  modified_base 15: mod_base = OTHER; note = 2'-fluoro uridine
  modified_base 16: mod_base = OTHER; note = 2'O-methyl adenosine
  modified_base 17: mod_base = OTHER; note = 2'-fluoro cytidine
  modified_base 18: mod_base = OTHER; note = 2'O-methyl guanosine
  modified_base 19: mod_base = OTHER; note = 2'-fluoro cytidine phosphorothioate
  modified_base 20: mod_base = OTHER; note = 2'O-methyl uridine phosphorothioate
  modified_base 21: mod_base = OTHER; note = 2'O-methyl uridine
caccaagctcagtctacgctt

SEQ ID NO: 1092 - RNA, 21 nt, synthetic construct
  source 1..21: mol_type = other RNA
  modified_base 1: mod_base = OTHER; note = 2'-fluoro adenosine phosphorothioate
  modified_base 2: mod_base = OTHER; note = 2'O-methyl cytidine phosphorothioate
  modified_base 3: mod_base = OTHER; note = 2'-fluoro cytidine
  modified_base 4: mod_base = OTHER; note = 2'O-methyl adenosine
  modified_base 5: mod_base = OTHER; note = 2'-fluoro adenosine
  modified_base 6: mod_base = OTHER; note = 2'O-methyl guanosine
  modified_base 7: mod_base = OTHER; note = 2'-fluoro cytidine
  modified_base 8: mod_base = OTHER; note = 2'O-methyl uridine
  modified_base 9: mod_base = OTHER; note = 2'-fluoro cytidine
  modified_base 10: mod_base = OTHER; note = 2'O-methyl adenosine
  modified_base 11: mod_base = OTHER; note = 2'-fluoro guanosine
  modified_base 12: mod_base = OTHER; note = 2'O-methyl uridine
  modified_base 13: mod_base = OTHER; note = 2'-fluoro cytidine
  modified_base 14: mod_base = OTHER; note = 2'O-methyl uridine
  modified_base 15: mod_base = OTHER; note = 2'-fluoro adenosine
  modified_base 16: mod_base = OTHER; note = 2'O-methyl cytidine
  modified_base 17: mod_base = OTHER; note = 2'-fluoro guanosine
  modified_base 18: mod_base = OTHER; note = 2'O-methyl cytidine
  modified_base 19: mod_base = OTHER; note = 2'-fluoro cytidine phosphorothioate
  modified_base 20: mod_base = OTHER; note = 2'O-methyl uridine phosphorothioate
  modified_base 21: mod_base = OTHER; note = 2'O-methyl uridine
accaagctcagtctacgcctt

SEQ ID NO: 1093 - RNA, 21 nt, synthetic construct
  source 1..21: mol_type = other RNA
  modified_base 1: mod_base = OTHER; note = 2'-fluoro cytidine phosphorothioate
  modified_base 2: mod_base = OTHER; note = 2'O-methyl cytidine phosphorothioate
  modified_base 3: mod_base = OTHER; note = 2'-fluoro adenosine
  modified_base 4: mod_base = OTHER; note = 2'O-methyl adenosine
  modified_base 5: mod_base = OTHER; note = 2'-fluoro guanosine
  modified_base 6: mod_base = OTHER; note = 2'O-methyl cytidine
  modified_base 7: mod_base = OTHER; note = 2'-fluoro uridine
  modified_base 8: mod_base = OTHER; note = 2'O-methyl cytidine
  modified_base 9: mod_base = OTHER; note = 2'-fluoro adenosine
  modified_base 10: mod_base = OTHER; note = 2'O-methyl guanosine
  modified_base 11: mod_base = OTHER; note = 2'-fluoro uridine
  modified_base 12: mod_base = OTHER; note = 2'O-methyl cytidine
  modified_base 13: mod_base = OTHER; note = 2'-fluoro uridine
  modified_base 14: mod_base = OTHER; note = 2'O-methyl adenosine
  modified_base 15: mod_base = OTHER; note = 2'-fluoro cytidine
  modified_base 16: mod_base = OTHER; note = 2'O-methyl guanosine
  modified_base 17: mod_base = OTHER; note = 2'-fluoro cytidine
  modified_base 18: mod_base = OTHER; note = 2'O-methyl cytidine
  modified_base 19: mod_base = OTHER; note = 2'-fluoro uridine phosphorothioate
  modified_base 20: mod_base = OTHER; note = 2'O-methyl uridine phosphorothioate
  modified_base 21: mod_base = OTHER; note = 2'O-methyl uridine
ccaagctcagtctacgccttt

SEQ ID NO: 1094 - RNA, 21 nt, synthetic construct
  source 1..21: mol_type = other RNA
  modified_base 1: mod_base = OTHER; note = 2'-fluoro cytidine phosphorothioate
  modified_base 2: mod_base = OTHER; note = 2'O-methyl adenosine phosphorothioate
  modified_base 3: mod_base = OTHER; note = 2'-fluoro adenosine
  modified_base 4: mod_base = OTHER; note = 2'O-methyl guanosine
  modified_base 5: mod_base = OTHER; note = 2'-fluoro cytidine
  modified_base 6: mod_base = OTHER; note = 2'O-methyl uridine
  modified_base 7: mod_base = OTHER; note = 2'-fluoro cytidine
  modified_base 8: mod_base = OTHER; note = 2'O-methyl adenosine
  modified_base 9: mod_base = OTHER; note = 2'-fluoro guanosine
  modified_base 10: mod_base = OTHER; note = 2'O-methyl uridine
  modified_base 11: mod_base = OTHER; note = 2'-fluoro cytidine
  modified_base 12: mod_base = OTHER; note = 2'O-methyl uridine
  modified_base 13: mod_base = OTHER; note = 2'-fluoro adenosine
  modified_base 14: mod_base = OTHER; note = 2'O-methyl cytidine
  modified_base 15: mod_base = OTHER; note = 2'-fluoro guanosine
  modified_base 16: mod_base = OTHER; note = 2'O-methyl cytidine
  modified_base 17: mod_base = OTHER; note = 2'-fluoro cytidine
  modified_base 18: mod_base = OTHER; note = 2'O-methyl uridine
  modified_base 19: mod_base = OTHER; note = 2'-fluoro cytidine phosphorothioate
  modified_base 20: mod_base = OTHER; note = 2'O-methyl uridine phosphorothioate
  modified_base 21: mod_base = OTHER; note = 2'O-methyl uridine
caagctcagtctacgcctctt

SEQ ID NO: 1095 - RNA, 21 nt, synthetic construct
  source 1..21: mol_type = other RNA
  modified_base 1: mod_base = OTHER; note = 2'-fluoro adenosine phosphorothioate
  modified_base 2: mod_base = OTHER; note = 2'O-methyl guanosine phosphorothioate
  modified_base 3: mod_base = OTHER; note = 2'-fluoro cytidine
  modified_base 4: mod_base = OTHER; note = 2'O-methyl uridine
  modified_base 5: mod_base = OTHER; note = 2'-fluoro cytidine
  modified_base 6: mod_base = OTHER; note = 2'O-methyl adenosine
  modified_base 7: mod_base = OTHER; note = 2'-fluoro guanosine
  modified_base 8: mod_base = OTHER; note = 2'O-methyl uridine
  modified_base 9: mod_base = OTHER; note = 2'-fluoro cytidine
  modified_base 10: mod_base = OTHER; note = 2'O-methyl uridine
  modified_base 11: mod_base = OTHER; note = 2'-fluoro adenosine
  modified_base 12: mod_base = OTHER; note = 2'O-methyl cytidine
  modified_base 13: mod_base = OTHER; note = 2'-fluoro guanosine
  modified_base 14: mod_base = OTHER; note = 2'O-methyl cytidine
  modified_base 15: mod_base = OTHER; note = 2'-fluoro cytidine
  modified_base 16: mod_base = OTHER; note = 2'O-methyl uridine
  modified_base 17: mod_base = OTHER; note = 2'-fluoro cytidine
  modified_base 18: mod_base = OTHER; note = 2'O-methyl uridine
  modified_base 19: mod_base = OTHER; note = 2'-fluoro guanosine phosphorothioate
  modified_base 20: mod_base = OTHER; note = 2'O-methyl uridine phosphorothioate
  modified_base 21: mod_base = OTHER; note = 2'O-methyl uridine
agctcagtctacgcctctgtt

SEQ ID NO: 1096 - RNA, 21 nt, synthetic construct
  source 1..21: mol_type = other RNA
  modified_base 1: mod_base = OTHER; note = 2'-fluoro cytidine phosphorothioate
  modified_base 2: mod_base = OTHER; note = 2'O-methyl adenosine phosphorothioate
  modified_base 3: mod_base = OTHER; note = 2'-fluoro guanosine
  modified_base 4: mod_base = OTHER; note = 2'O-methyl uridine
  modified_base 5: mod_base = OTHER; note = 2'-fluoro cytidine
  modified_base 6: mod_base = OTHER; note = 2'O-methyl uridine
  modified_base 7: mod_base = OTHER; note = 2'-fluoro adenosine
  modified_base 8: mod_base = OTHER; note = 2'O-methyl cytidine
  modified_base 9: mod_base = OTHER; note = 2'-fluoro guanosine
  modified_base 10: mod_base = OTHER; note = 2'O-methyl cytidine
  modified_base 11: mod_base = OTHER; note = 2'-fluoro cytidine
  modified_base 12: mod_base = OTHER; note = 2'O-methyl uridine
  modified_base 13: mod_base = OTHER; note = 2'-fluoro cytidine
  modified_base 14: mod_base = OTHER; note = 2'O-methyl uridine
  modified_base 15: mod_base = OTHER; note = 2'-fluoro guanosine
  modified_base 16: mod_base = OTHER; note = 2'O-methyl cytidine
  modified_base 17: mod_base = OTHER; note = 2'-fluoro adenosine
  modified_base 18: mod_base = OTHER; note = 2'O-methyl cytidine
  modified_base 19: mod_base = OTHER; note = 2'-fluoro adenosine phosphorothioate
  modified_base 20: mod_base = OTHER; note = 2'O-methyl uridine phosphorothioate
  modified_base 21: mod_base = OTHER; note = 2'O-methyl uridine
cagtctacgcctctgcacatt

SEQ ID NO: 1097 - RNA, 21 nt, synthetic construct
  source 1..21: mol_type = other RNA
  modified_base 1: mod_base = OTHER; note = 2'-fluoro adenosine phosphorothioate
  modified_base 2: mod_base = OTHER; note = 2'O-methyl guanosine phosphorothioate
  modified_base 3: mod_base = OTHER; note = 2'-fluoro uridine
  modified_base 4: mod_base = OTHER; note = 2'O-methyl cytidine
  modified_base 5: mod_base = OTHER; note = 2'-fluoro uridine
  modified_base 6: mod_base = OTHER; note = 2'O-methyl adenosine
  modified_base 7: mod_base = OTHER; note = 2'-fluoro cytidine
  modified_base 8: mod_base = OTHER; note = 2'O-methyl guanosine
  modified_base 9: mod_base = OTHER; note = 2'-fluoro cytidine
  modified_base 10: mod_base = OTHER; note = 2'O-methyl cytidine
  modified_base 11: mod_base = OTHER; note = 2'-fluoro uridine
  modified_base 12: mod_base = OTHER; note = 2'O-methyl cytidine
  modified_base 13: mod_base = OTHER; note = 2'-fluoro uridine
  modified_base 14: mod_base = OTHER; note = 2'O-methyl guanosine
  modified_base 15: mod_base = OTHER; note = 2'-fluoro cytidine
  modified_base 16: mod_base = OTHER; note = 2'O-methyl adenosine
  modified_base 17: mod_base = OTHER; note = 2'-fluoro cytidine
  modified_base 18: mod_base = OTHER; note = 2'O-methyl adenosine
  modified_base 19: mod_base = OTHER; note = 2'-fluoro guanosine phosphorothioate
  modified_base 20: mod_base = OTHER; note = 2'O-methyl uridine phosphorothioate
  modified_base 21: mod_base = OTHER; note = 2'O-methyl uridine
agtctacgcctctgcacagtt

SEQ ID NO: 1098 - RNA, 21 nt, synthetic construct
  source 1..21: mol_type = other RNA
  modified_base 1: mod_base = OTHER; note = 2'-fluoro adenosine phosphorothioate
  modified_base 2: mod_base = OTHER; note = 2'O-methyl cytidine phosphorothioate
  modified_base 3: mod_base = OTHER; note = 2'-fluoro guanosine
  modified_base 4: mod_base = OTHER; note = 2'O-methyl cytidine
  modified_base 5: mod_base = OTHER; note = 2'-fluoro cytidine
  modified_base 6: mod_base = OTHER; note = 2'O-methyl uridine
  modified_base 7: mod_base = OTHER; note = 2'-fluoro cytidine
  modified_base 8: mod_base = OTHER; note = 2'O-methyl uridine
  modified_base 9: mod_base = OTHER; note = 2'-fluoro guanosine
  modified_base 10: mod_base = OTHER; note = 2'O-methyl cytidine
  modified_base 11: mod_base = OTHER; note = 2'-fluoro adenosine
  modified_base 12: mod_base = OTHER; note = 2'O-methyl cytidine
  modified_base 13: mod_base = OTHER; note = 2'-fluoro adenosine
  modified_base 14: mod_base = OTHER; note = 2'O-methyl guanosine
  modified_base 15: mod_base = OTHER; note = 2'-fluoro guanosine
  modified_base 16: mod_base = OTHER; note = 2'O-methyl guanosine
  modified_base 17: mod_base = OTHER; note = 2'-fluoro adenosine
  modified_base 18: mod_base = OTHER; note = 2'O-methyl adenosine
  modified_base 19: mod_base = OTHER; note = 2'-fluoro cytidine phosphorothioate
  modified_base 20: mod_base = OTHER; note = 2'O-methyl uridine phosphorothioate
  modified_base 21: mod_base = OTHER; note = 2'O-methyl uridine
acgcctctgcacagggaactt

SEQ ID NO: 1099 - RNA, 21 nt, synthetic construct
  source 1..21: mol_type = other RNA
  modified_base 1: mod_base = OTHER; note = 2'-fluoro cytidine phosphorothioate
  modified_base 2: mod_base = OTHER; note = 2'O-methyl uridine phosphorothioate
  modified_base 3: mod_base = OTHER; note = 2'-fluoro guanosine
  modified_base 4: mod_base = OTHER; note = 2'O-methyl cytidine
  modified_base 5: mod_base = OTHER; note = 2'-fluoro adenosine
  modified_base 6: mod_base = OTHER; note = 2'O-methyl cytidine
  modified_base 7: mod_base = OTHER; note = 2'-fluoro adenosine
  modified_base 8: mod_base = OTHER; note = 2'O-methyl guanosine
  modified_base 9: mod_base = OTHER; note = 2'-fluoro guanosine
  modified_base 10: mod_base = OTHER; note = 2'O-methyl guanosine
  modified_base 11: mod_base = OTHER; note = 2'-fluoro adenosine
  modified_base 12: mod_base = OTHER; note = 2'O-methyl adenosine
  modified_base 13: mod_base = OTHER; note = 2'-fluoro cytidine
  modified_base 14: mod_base = OTHER; note = 2'O-methyl cytidine
  modified_base 15: mod_base = OTHER; note = 2'-fluoro uridine
  modified_base 16: mod_base = OTHER; note = 2'O-methyl cytidine
  modified_base 17: mod_base = OTHER; note = 2'-fluoro uridine
  modified_base 18: mod_base = OTHER; note = 2'O-methyl adenosine
  modified_base 19: mod_base = OTHER; note = 2'-fluoro cytidine phosphorothioate
  modified_base 20: mod_base = OTHER; note = 2'O-methyl uridine phosphorothioate
  modified_base 21: mod_base = OTHER; note = 2'O-methyl uridine
ctgcacagggaacctctactt

SEQ ID NO: 1100 - RNA, 21 nt, synthetic construct
  source 1..21: mol_type = other RNA
  modified_base 1: mod_base = OTHER; note = 2'-fluoro uridine phosphorothioate
  modified_base 2: mod_base = OTHER; note = 2'O-methyl guanosine phosphorothioate
  modified_base 3: mod_base = OTHER; note = 2'-fluoro cytidine
  modified_base 4: mod_base = OTHER; note = 2'O-methyl adenosine
  modified_base 5: mod_base = OTHER; note = 2'-fluoro cytidine
  modified_base 6: mod_base = OTHER; note = 2'O-methyl adenosine
  modified_base 7: mod_base = OTHER; note = 2'-fluoro guanosine
  modified_base 8: mod_base = OTHER; note = 2'O-methyl guanosine
  modified_base 9: mod_base = OTHER; note = 2'-fluoro guanosine
  modified_base 10: mod_base = OTHER; note = 2'O-methyl adenosine
  modified_base 11: mod_base = OTHER; note = 2'-fluoro adenosine
  modified_base 12: mod_base = OTHER; note = 2'O-methyl cytidine
  modified_base 13: mod_base = OTHER; note = 2'-fluoro cytidine
  modified_base 14: mod_base = OTHER; note = 2'O-methyl uridine
  modified_base 15: mod_base = OTHER; note = 2'-fluoro cytidine
  modified_base 16: mod_base = OTHER; note = 2'O-methyl uridine
  modified_base 17: mod_base = OTHER; note = 2'-fluoro adenosine
  modified_base 18: mod_base = OTHER; note = 2'O-methyl cytidine
  modified_base 19: mod_base = OTHER; note = 2'-fluoro cytidine phosphorothioate
  modified_base 20: mod_base = OTHER; note = 2'O-methyl uridine phosphorothioate
  modified_base 21: mod_base = OTHER; note = 2'O-methyl uridine
tgcacagggaacctctacctt

SEQ ID NO: 1101 - RNA, 21 nt, synthetic construct
  source 1..21: mol_type = other RNA
  modified_base 1: mod_base = OTHER; note = 2'-fluoro adenosine phosphorothioate
  modified_base 2: mod_base = OTHER; note = 2'O-methyl cytidine phosphorothioate
  modified_base 3: mod_base = OTHER; note = 2'-fluoro adenosine
  modified_base 4: mod_base = OTHER; note = 2'O-methyl guanosine
  modified_base 5: mod_base = OTHER; note = 2'-fluoro guanosine
  modified_base 6: mod_base = OTHER; note = 2'O-methyl guanosine
  modified_base 7: mod_base = OTHER; note = 2'-fluoro adenosine
  modified_base 8: mod_base = OTHER; note = 2'O-methyl adenosine
  modified_base 9: mod_base = OTHER; note = 2'-fluoro cytidine
  modified_base 10: mod_base = OTHER; note = 2'O-methyl cytidine
  modified_base 11: mod_base = OTHER; note = 2'-fluoro uridine
  modified_base 12: mod_base = OTHER; note = 2'O-methyl cytidine
  modified_base 13: mod_base = OTHER; note = 2'-fluoro uridine
  modified_base 14: mod_base = OTHER; note = 2'O-methyl adenosine
  modified_base 15: mod_base = OTHER; note = 2'-fluoro cytidine
  modified_base 16: mod_base = OTHER; note = 2'O-methyl cytidine
  modified_base 17: mod_base = OTHER; note = 2'-fluoro uridine
  modified_base 18: mod_base = OTHER; note = 2'O-methyl uridine
  modified_base 19: mod_base = OTHER; note = 2'-fluoro cytidine phosphorothioate
  modified_base 20: mod_base = OTHER; note = 2'O-methyl uridine phosphorothioate
  modified_base 21: mod_base = OTHER; note = 2'O-methyl uridine
acagggaacctctaccttctt

SEQ ID NO: 1102 - RNA, 21 nt, synthetic construct
  source 1..21: mol_type = other RNA
  modified_base 1: mod_base = OTHER; note = 2'-fluoro cytidine phosphorothioate
  modified_base 2: mod_base = OTHER; note = 2'O-methyl uridine phosphorothioate
  modified_base 3: mod_base = OTHER; note = 2'-fluoro cytidine
  modified_base 4: mod_base = OTHER; note = 2'O-methyl adenosine
  modified_base 5: mod_base = OTHER; note = 2'-fluoro adenosine
  modified_base 6: mod_base = OTHER; note = 2'O-methyl guanosine
  modified_base 7: mod_base = OTHER; note = 2'-fluoro guanosine
  modified_base 8: mod_base = OTHER; note = 2'O-methyl uridine
  modified_base 9: mod_base = OTHER; note = 2'-fluoro guanosine
  modified_base 10: mod_base = OTHER; note = 2'O-methyl cytidine
  modified_base 11: mod_base = OTHER; note = 2'-fluoro uridine
  modified_base 12: mod_base = OTHER; note = 2'O-methyl guanosine
  modified_base 13: mod_base = OTHER; note = 2'-fluoro guanosine
  modified_base 14: mod_base = OTHER; note = 2'O-methyl guanosine
  modified_base 15: mod_base = OTHER; note = 2'-fluoro adenosine
  modified_base 16: mod_base = OTHER; note = 2'O-methyl guanosine
  modified_base 17: mod_base = OTHER; note = 2'-fluoro adenosine
  modified_base 18: mod_base = OTHER; note = 2'O-methyl guanosine
  modified_base 19: mod_base = OTHER; note = 2'-fluoro adenosine phosphorothioate
  modified_base 20: mod_base = OTHER; note = 2'O-methyl uridine phosphorothioate
  modified_base 21: mod_base = OTHER; note = 2'O-methyl uridine
ctcaaggtgctgggagagatt

SEQ ID NO: 1103 - RNA, 21 nt, synthetic construct
  source 1..21: mol_type = other RNA
  modified_base 1: mod_base = OTHER; note = 2'-fluoro adenosine phosphorothioate
  modified_base 2: mod_base = OTHER; note = 2'O-methyl adenosine phosphorothioate
  modified_base 3: mod_base = OTHER; note = 2'-fluoro guanosine
  modified_base 4: mod_base = OTHER; note = 2'O-methyl guanosine
  modified_base 5: mod_base = OTHER; note = 2'-fluoro uridine
  modified_base 6: mod_base = OTHER; note = 2'O-methyl guanosine
  modified_base 7: mod_base = OTHER; note = 2'-fluoro cytidine
  modified_base 8: mod_base = OTHER; note = 2'O-methyl uridine
  modified_base 9: mod_base = OTHER; note = 2'-fluoro guanosine
  modified_base 10: mod_base = OTHER; note = 2'O-methyl guanosine
  modified_base 11: mod_base = OTHER; note = 2'-fluoro guanosine
  modified_base 12: mod_base = OTHER; note = 2'O-methyl adenosine
  modified_base 13: mod_base = OTHER; note = 2'-fluoro guanosine
  modified_base 14: mod_base = OTHER; note = 2'O-methyl adenosine
  modified_base 15: mod_base = OTHER; note = 2'-fluoro guanosine
  modified_base 16: mod_base = OTHER; note = 2'O-methyl adenosine
  modified_base 17: mod_base = OTHER; note = 2'-fluoro uridine
  modified_base 18: mod_base = OTHER; note = 2'O-methyl adenosine
  modified_base 19: mod_base = OTHER; note = 2'-fluoro uridine phosphorothioate
  modified_base 20: mod_base = OTHER; note = 2'O-methyl uridine phosphorothioate
  modified_base 21: mod_base = OTHER; note = 2'O-methyl uridine
aaggtgctgggagagatattt

SEQ ID NO: 1104 - RNA, 21 nt, synthetic construct
  source 1..21: mol_type = other RNA
  modified_base 1: mod_base = OTHER; note = 2'-fluoro adenosine phosphorothioate
  modified_base 2: mod_base = OTHER; note = 2'O-methyl guanosine phosphorothioate
  modified_base 3: mod_base = OTHER; note = 2'-fluoro guanosine
  modified_base 4: mod_base = OTHER; note = 2'O-methyl uridine
  modified_base 5: mod_base = OTHER; note = 2'-fluoro guanosine
  modified_base 6: mod_base = OTHER; note = 2'O-methyl cytidine
  modified_base 7: mod_base = OTHER; note = 2'-fluoro uridine
  modified_base 8: mod_base = OTHER; note = 2'O-methyl guanosine
  modified_base 9: mod_base = OTHER; note = 2'-fluoro guanosine
  modified_base 10: mod_base = OTHER; note = 2'O-methyl guanosine
  modified_base 11: mod_base = OTHER; note = 2'-fluoro adenosine
  modified_base 12: mod_base = OTHER; note = 2'O-methyl guanosine
  modified_base 13: mod_base = OTHER; note = 2'-fluoro adenosine
  modified_base 14: mod_base = OTHER; note = 2'O-methyl guanosine
  modified_base 15: mod_base = OTHER; note = 2'-fluoro adenosine
  modified_base 16: mod_base = OTHER; note = 2'O-methyl uridine
  modified_base 17: mod_base = OTHER; note = 2'-fluoro adenosine
  modified_base 18: mod_base = OTHER; note = 2'O-methyl uridine
  modified_base 19: mod_base = OTHER; note = 2'-fluoro guanosine phosphorothioate
  modified_base 20: mod_base = OTHER; note = 2'O-methyl uridine phosphorothioate
  modified_base 21: mod_base = OTHER; note = 2'O-methyl uridine
aggtgctgggagagatatgtt

SEQ ID NO: 1105 - RNA, 21 nt, synthetic construct
  source 1..21: mol_type = other RNA
  modified_base 1: mod_base = OTHER; note = 2'-fluoro guanosine phosphorothioate
  modified_base 2: mod_base = OTHER; note = 2'O-methyl guanosine phosphorothioate
  modified_base 3: mod_base = OTHER; note = 2'-fluoro uridine
  modified_base 4: mod_base = OTHER; note = 2'O-methyl guanosine
  modified_base 5: mod_base = OTHER; note = 2'-fluoro cytidine
  modified_base 6: mod_base = OTHER; note = 2'O-methyl uridine
  modified_base 7: mod_base = OTHER; note = 2'-fluoro guanosine
  modified_base 8: mod_base = OTHER; note = 2'O-methyl guanosine
  modified_base 9: mod_base = OTHER; note = 2'-fluoro guanosine
  modified_base 10: mod_base = OTHER; note = 2'O-methyl adenosine
  modified_base 11: mod_base = OTHER; note = 2'-fluoro guanosine
  modified_base 12: mod_base = OTHER; note = 2'O-methyl adenosine
  modified_base 13: mod_base = OTHER; note = 2'-fluoro guanosine
  modified_base 14: mod_base = OTHER; note = 2'O-methyl adenosine
  modified_base 15: mod_base = OTHER; note = 2'-fluoro uridine
  modified_base 16: mod_base = OTHER; note = 2'O-methyl adenosine
  modified_base 17: mod_base = OTHER; note = 2'-fluoro uridine
  modified_base 18: mod_base = OTHER; note = 2'O-methyl guanosine
  modified_base 19: mod_base = OTHER; note = 2'-fluoro cytidine phosphorothioate
  modified_base 20: mod_base = OTHER; note = 2'O-methyl uridine phosphorothioate
  modified_base 21: mod_base = OTHER; note = 2'O-methyl uridine
ggtgctgggagagatatgctt

SEQ ID NO: 1106 - RNA, 21 nt, synthetic construct
  source 1..21: mol_type = other RNA
  modified_base 1: mod_base = OTHER; note = 2'-fluoro guanosine phosphorothioate
  modified_base 2: mod_base = OTHER; note = 2'O-methyl uridine phosphorothioate
  modified_base 3: mod_base = OTHER; note = 2'-fluoro guanosine
  modified_base 4: mod_base = OTHER; note = 2'O-methyl cytidine
  modified_base 5: mod_base = OTHER; note = 2'-fluoro uridine
  modified_base 6: mod_base = OTHER; note = 2'O-methyl guanosine
  modified_base 7: mod_base = OTHER; note = 2'-fluoro guanosine
  modified_base 8: mod_base = OTHER; note = 2'O-methyl guanosine
  modified_base 9: mod_base = OTHER; note = 2'-fluoro adenosine
  modified_base 10: mod_base = OTHER; note = 2'O-methyl guanosine
  modified_base 11: mod_base = OTHER; note = 2'-fluoro adenosine
  modified_base 12: mod_base = OTHER; note = 2'O-methyl guanosine
  modified_base 13: mod_base = OTHER; note = 2'-fluoro adenosine
  modified_base 14: mod_base = OTHER; note = 2'O-methyl uridine
  modified_base 15: mod_base = OTHER; note = 2'-fluoro adenosine
  modified_base 16: mod_base = OTHER; note = 2'O-methyl uridine
  modified_base 17: mod_base = OTHER; note = 2'-fluoro guanosine
  modified_base 18: mod_base = OTHER; note = 2'O-methyl cytidine
  modified_base 19: mod_base = OTHER; note = 2'-fluoro cytidine phosphorothioate
  modified_base 20: mod_base = OTHER; note = 2'O-methyl uridine phosphorothioate
  modified_base 21: mod_base = OTHER; note = 2'O-methyl uridine
gtgctgggagagatatgcctt

SEQ ID NO: 1107 - RNA, 21 nt, synthetic construct
  source 1..21: mol_type = other RNA
  modified_base 1: mod_base = OTHER; note = 2'-fluoro uridine phosphorothioate
  modified_base 2: mod_base = OTHER; note = 2'O-methyl guanosine phosphorothioate
  modified_base 3: mod_base = OTHER; note = 2'-fluoro cytidine
  modified_base 4: mod_base = OTHER; note = 2'O-methyl uridine
  modified_base 5: mod_base = OTHER; note = 2'-fluoro guanosine
  modified_base 6: mod_base = OTHER; note = 2'O-methyl guanosine
  modified_base 7: mod_base = OTHER; note = 2'-fluoro guanosine
  modified_base 8: mod_base = OTHER; note = 2'O-methyl adenosine
  modified_base 9: mod_base = OTHER; note = 2'-fluoro guanosine
  modified_base 10: mod_base = OTHER; note = 2'O-methyl adenosine
  modified_base 11: mod_base = OTHER; note = 2'-fluoro guanosine
  modified_base 12: mod_base = OTHER; note = 2'O-methyl adenosine
  modified_base 13: mod_base = OTHER; note = 2'-fluoro uridine
  modified_base 14: mod_base = OTHER; note = 2'O-methyl adenosine
  modified_base 15: mod_base = OTHER; note = 2'-fluoro uridine
  modified_base 16: mod_base = OTHER; note = 2'O-methyl guanosine
  modified_base 17: mod_base = OTHER; note = 2'-fluoro cytidine
  modified_base 18: mod_base = OTHER; note = 2'O-methyl cytidine
  modified_base 19: mod_base = OTHER; note = 2'-fluoro uridine phosphorothioate
  modified_base 20: mod_base = OTHER; note = 2'O-methyl uridine phosphorothioate
  modified_base 21: mod_base = OTHER; note = 2'O-methyl uridine
tgctgggagagatatgccttt

SEQ ID NO: 1108 - RNA, 21 nt, synthetic construct
  source 1..21: mol_type = other RNA
  modified_base 1: mod_base = OTHER; note = 2'-fluoro guanosine phosphorothioate
  modified_base 2: mod_base = OTHER; note = 2'O-methyl guanosine phosphorothioate
  modified_base 3: mod_base = OTHER; note = 2'-fluoro adenosine
  modified_base 4: mod_base = OTHER; note = 2'O-methyl guanosine
  modified_base 5: mod_base = OTHER; note = 2'-fluoro adenosine
  modified_base 6: mod_base = OTHER; note = 2'O-methyl guanosine
  modified_base 7: mod_base = OTHER; note = 2'-fluoro adenosine
  modified_base 8: mod_base = OTHER; note = 2'O-methyl uridine
  modified_base 9: mod_base = OTHER; note = 2'-fluoro adenosine
  modified_base 10: mod_base = OTHER; note = 2'O-methyl uridine
  modified_base 11: mod_base = OTHER; note = 2'-fluoro guanosine
  modified_base 12: mod_base = OTHER; note = 2'O-methyl cytidine
  modified_base 13: mod_base = OTHER; note = 2'-fluoro cytidine
  modified_base 14: mod_base = OTHER; note = 2'O-methyl uridine
  modified_base 15: mod_base = OTHER; note = 2'-fluoro uridine
  modified_base 16: mod_base = OTHER; note = 2'O-methyl cytidine
  modified_base 17: mod_base = OTHER; note = 2'-fluoro guanosine
  modified_base 18: mod_base = OTHER; note = 2'O-methyl adenosine
  modified_base 19: mod_base = OTHER; note = 2'-fluoro guanosine phosphorothioate
  modified_base 20: mod_base = OTHER; note = 2'O-methyl uridine phosphorothioate
  modified_base 21: mod_base = OTHER; note = 2'O-methyl uridine
ggagagatatgccttcgagtt

SEQ ID NO: 1109 - RNA, 21 nt, synthetic construct
  source 1..21: mol_type = other RNA
  modified_base 1: mod_base = OTHER; note = 2'-fluoro adenosine phosphorothioate
  modified_base 2: mod_base = OTHER; note = 2'O-methyl uridine phosphorothioate
  modified_base 3: mod_base = OTHER; note = 2'-fluoro uridine
  modified_base 4: mod_base = OTHER; note = 2'O-methyl cytidine
  modified_base 5: mod_base = OTHER; note = 2'-fluoro adenosine
  modified_base 6: mod_base = OTHER; note = 2'O-methyl guanosine
  modified_base 7: mod_base = OTHER; note = 2'-fluoro guanosine
  modified_base 8: mod_base = OTHER; note = 2'O-methyl uridine
  modified_base 9: mod_base = OTHER; note = 2'-fluoro uridine
  modified_base 10: mod_base = OTHER; note = 2'O-methyl cytidine
  modified_base 11: mod_base = OTHER; note = 2'-fluoro uridine
  modified_base 12: mod_base = OTHER; note = 2'O-methyl uridine
  modified_base 13: mod_base = OTHER; note = 2'-fluoro guanosine
  modified_base 14: mod_base = OTHER; note = 2'O-methyl guanosine
  modified_base 15: mod_base = OTHER; note = 2'-fluoro adenosine
  modified_base 16: mod_base = OTHER; note = 2'O-methyl adenosine
  modified_base 17: mod_base = OTHER; note = 2'-fluoro guanosine
  modified_base 18: mod_base = OTHER; note = 2'O-methyl adenosine
  modified_base 19: mod_base = OTHER; note = 2'-fluoro guanosine phosphorothioate
  modified_base 20: mod_base = OTHER; note = 2'O-methyl uridine phosphorothioate
  modified_base 21: mod_base = OTHER; note = 2'O-methyl uridine
attcaggttcttggaagagtt

SEQ ID NO: 1110 - RNA, 21 nt, synthetic construct
  source 1..21: mol_type = other RNA
  modified_base 1: mod_base = OTHER; note = 2'-fluoro uridine phosphorothioate
  modified_base 2: mod_base = OTHER; note = 2'O-methyl cytidine phosphorothioate
  modified_base 3: mod_base = OTHER; note = 2'-fluoro adenosine
  modified_base 4: mod_base = OTHER; note = 2'O-methyl guanosine
  modified_base 5: mod_base = OTHER; note = 2'-fluoro guanosine
  modified_base 6: mod_base = OTHER; note = 2'O-methyl uridine
  modified_base 7: mod_base = OTHER; note = 2'-fluoro uridine
  modified_base 8: mod_base = OTHER; note = 2'O-methyl cytidine
  modified_base 9: mod_base = OTHER; note = 2'-fluoro uridine
  modified_base 10: mod_base = OTHER; note = 2'O-methyl uridine
  modified_base 11: mod_base = OTHER; note = 2'-fluoro guanosine
  modified_base 12: mod_base = OTHER; note = 2'O-methyl guanosine
  modified_base 13: mod_base = OTHER; note = 2'-fluoro adenosine
  modified_base 14: mod_base = OTHER; note = 2'O-methyl adenosine
  modified_base 15: mod_base = OTHER; note = 2'-fluoro guanosine
  modified_base 16: mod_base = OTHER; note = 2'O-methyl adenosine
  modified_base 17: mod_base = OTHER; note = 2'-fluoro guanosine
  modified_base 18: mod_base = OTHER; note = 2'O-methyl adenosine
  modified_base 19: mod_base = OTHER; note = 2'-fluoro adenosine phosphorothioate
  modified_base 20: mod_base = OTHER; note = 2'O-methyl uridine phosphorothioate
  modified_base 21: mod_base = OTHER; note = 2'O-methyl uridine
tcaggttcttggaagagaatt

SEQ ID NO: 1111 - RNA, 21 nt, synthetic construct
  source 1..21: mol_type = other RNA
  modified_base 1: mod_base = OTHER; note = 2'-fluoro uridine phosphorothioate
  modified_base 2: mod_base = OTHER; note = 2'O-methyl cytidine phosphorothioate
  modified_base 3: mod_base = OTHER; note = 2'-fluoro uridine
  modified_base 4: mod_base = OTHER; note = 2'O-methyl uridine
  modified_base 5: mod_base = OTHER; note = 2'-fluoro guanosine
  modified_base 6: mod_base = OTHER; note = 2'O-methyl guanosine
  modified_base 7: mod_base = OTHER; note = 2'-fluoro adenosine
  modified_base 8: mod_base = OTHER; note = 2'O-methyl adenosine
  modified_base 9: mod_base = OTHER; note = 2'-fluoro guanosine
  modified_base 10: mod_base = OTHER; note = 2'O-methyl adenosine
  modified_base 11: mod_base = OTHER; note = 2'-fluoro guanosine
  modified_base 12: mod_base = OTHER; note = 2'O-methyl adenosine
  modified_base 13: mod_base = OTHER; note = 2'-fluoro adenosine
  modified_base 14: mod_base = OTHER; note = 2'O-methyl guanosine
  modified_base 15: mod_base = OTHER; note = 2'-fluoro guanosine
  modified_base 16: mod_base = OTHER; note = 2'O-methyl guanosine
  modified_base 17: mod_base = OTHER; note = 2'-fluoro cytidine
  modified_base 18: mod_base = OTHER; note = 2'O-methyl adenosine
  modified_base 19: mod_base = OTHER; note = 2'-fluoro uridine phosphorothioate
  modified_base 20: mod_base = OTHER; note = 2'O-methyl uridine phosphorothioate
  modified_base 21: mod_base = OTHER; note = 2'O-methyl uridine
tcttggaagagaagggcattt

SEQ ID NO: 1112 - RNA, 21 nt, synthetic construct
  source 1..21: mol_type = other RNA
  modified_base 1: mod_base = OTHER; note = 2'-fluoro cytidine phosphorothioate
  modified_base 2: mod_base = OTHER; note = 2'O-methyl uridine phosphorothioate
  modified_base 3: mod_base = OTHER; note = 2'-fluoro uridine
  modified_base 4: mod_base = OTHER; note = 2'O-methyl guanosine
  modified_base 5: mod_base = OTHER; note = 2'-fluoro guanosine
  modified_base 6: mod_base = OTHER; note = 2'O-methyl adenosine
  modified_base 7: mod_base = OTHER; note = 2'-fluoro adenosine
  modified_base 8: mod_base = OTHER; note = 2'O-methyl guanosine
  modified_base 9: mod_base = OTHER; note = 2'-fluoro adenosine
  modified_base 10: mod_base = OTHER; note = 2'O-methyl guanosine
  modified_base 11: mod_base = OTHER; note = 2'-fluoro adenosine
  modified_base 12: mod_base = OTHER; note = 2'O-methyl adenosine
  modified_base 13: mod_base = OTHER; note = 2'-fluoro guanosine
  modified_base 14: mod_base = OTHER; note = 2'O-methyl guanosine
  modified_base 15: mod_base = OTHER; note = 2'-fluoro guanosine
  modified_base 16: mod_base = OTHER; note = 2'O-methyl cytidine
  modified_base 17: mod_base = OTHER; note = 2'-fluoro adenosine
  modified_base 18: mod_base = OTHER; note = 2'O-methyl uridine
  modified_base 19: mod_base = OTHER; note = 2'-fluoro cytidine phosphorothioate
  modified_base 20: mod_base = OTHER; note = 2'O-methyl uridine phosphorothioate
  modified_base 21: mod_base = OTHER; note = 2'O-methyl uridine
cttggaagagaagggcatctt

SEQ ID NO: 1113 - RNA, 21 nt, synthetic construct
  source 1..21: mol_type = other RNA
  modified_base 1: mod_base = OTHER; note = 2'-fluoro uridine phosphorothioate
  modified_base 2: mod_base = OTHER; note = 2'O-methyl uridine phosphorothioate
  modified_base 3: mod_base = OTHER; note = 2'-fluoro guanosine
  modified_base 4: mod_base = OTHER; note = 2'O-methyl guanosine
  modified_base 5: mod_base = OTHER; note = 2'-fluoro adenosine
  modified_base 6: mod_base = OTHER; note = 2'O-methyl adenosine
  modified_base 7: mod_base = OTHER; note = 2'-fluoro guanosine
  modified_base 8: mod_base = OTHER; note = 2'O-methyl adenosine
  modified_base 9: mod_base = OTHER; note = 2'-fluoro guanosine
  modified_base 10: mod_base = OTHER; note = 2'O-methyl adenosine
  modified_base 11: mod_base = OTHER; note = 2'-fluoro adenosine
  modified_base 12: mod_base = OTHER; note = 2'O-methyl guanosine
  modified_base 13: mod_base = OTHER; note = 2'-fluoro guanosine
  modified_base 14: mod_base = OTHER; note = 2'O-methyl guanosine
  modified_base 15: mod_base = OTHER; note = 2'-fluoro cytidine
  modified_base 16: mod_base = OTHER; note = 2'O-methyl adenosine
  modified_base 17: mod_base = OTHER; note = 2'-fluoro uridine
  modified_base 18: mod_base = OTHER; note = 2'O-methyl cytidine
  modified_base 19: mod_base = OTHER; note = 2'-fluoro uridine phosphorothioate
  modified_base 20: mod_base = OTHER; note = 2'O-methyl uridine phosphorothioate
  modified_base 21: mod_base = OTHER; note = 2'O-methyl uridine
ttggaagagaagggcatcttt

SEQ ID NO: 1114 - RNA, 21 nt, synthetic construct
  source 1..21: mol_type = other RNA
  modified_base 1: mod_base = OTHER; note = 2'-fluoro guanosine phosphorothioate
  modified_base 2: mod_base = OTHER; note = 2'O-methyl guanosine phosphorothioate
  modified_base 3: mod_base = OTHER; note = 2'-fluoro adenosine
  modified_base 4: mod_base = OTHER; note = 2'O-methyl adenosine
  modified_base 5: mod_base = OTHER; note = 2'-fluoro guanosine
  modified_base 6: mod_base = OTHER; note = 2'O-methyl adenosine
  modified_base 7: mod_base = OTHER; note = 2'-fluoro guanosine
  modified_base 8: mod_base = OTHER; note = 2'O-methyl adenosine
  modified_base 9: mod_base = OTHER; note = 2'-fluoro adenosine
  modified_base 10: mod_base = OTHER; note = 2'O-methyl guanosine
  modified_base 11: mod_base = OTHER; note = 2'-fluoro guanosine
  modified_base 12: mod_base = OTHER; note = 2'O-methyl guanosine
  modified_base 13: mod_base = OTHER; note = 2'-fluoro cytidine
  modified_base 14: mod_base = OTHER; note = 2'O-methyl adenosine
  modified_base 15: mod_base = OTHER; note = 2'-fluoro uridine
  modified_base 16: mod_base = OTHER; note = 2'O-methyl cytidine
  modified_base 17: mod_base = OTHER; note = 2'-fluoro uridine
  modified_base 18: mod_base = OTHER; note = 2'O-methyl guanosine
  modified_base 19: mod_base = OTHER; note = 2'-fluoro cytidine phosphorothioate
  modified_base 20: mod_base = OTHER; note = 2'O-methyl uridine phosphorothioate
  modified_base 21: mod_base = OTHER; note = 2'O-methyl uridine
ggaagagaagggcatctgctt

SEQ ID NO: 1115 - RNA, 21 nt, synthetic construct
  source 1..21: mol_type = other RNA
  modified_base 1: mod_base = OTHER; note = 2'-fluoro guanosine phosphorothioate
  modified_base 2: mod_base = OTHER; note = 2'O-methyl adenosine phosphorothioate
  modified_base 3: mod_base = OTHER; note = 2'-fluoro adenosine
  modified_base 4: mod_base = OTHER; note = 2'O-methyl guanosine
  modified_base 5: mod_base = OTHER; note = 2'-fluoro adenosine
  modified_base 6: mod_base = OTHER; note = 2'O-methyl guanosine
  modified_base 7: mod_base = OTHER; note = 2'-fluoro adenosine
  modified_base 8: mod_base = OTHER; note = 2'O-methyl adenosine
  modified_base 9: mod_base = OTHER; note = 2'-fluoro guanosine
  modified_base 10: mod_base = OTHER; note = 2'O-methyl guanosine
  modified_base 11: mod_base = OTHER; note = 2'-fluoro guanosine
  modified_base 12: mod_base = OTHER; note = 2'O-methyl cytidine
  modified_base 13: mod_base = OTHER; note = 2'-fluoro adenosine
  modified_base 14: mod_base = OTHER; note = 2'O-methyl uridine
  modified_base 15: mod_base = OTHER; note = 2'-fluoro cytidine
  modified_base 16: mod_base = OTHER; note = 2'O-methyl uridine
  modified_base 17: mod_base = OTHER; note = 2'-fluoro guanosine
  modified_base 18: mod_base = OTHER; note = 2'O-methyl cytidine
  modified_base 19: mod_base = OTHER; note = 2'-fluoro adenosine phosphorothioate
  modified_base 20: mod_base = OTHER; note = 2'O-methyl uridine phosphorothioate
  modified_base 21: mod_base = OTHER; note = 2'O-methyl uridine
gaagagaagggcatctgcatt

SEQ ID NO: 1116 - RNA, 21 nt, synthetic construct
  source 1..21: mol_type = other RNA
  modified_base 1: mod_base = OTHER; note = 2'-fluoro adenosine phosphorothioate
  modified_base 2: mod_base = OTHER; note = 2'O-methyl adenosine phosphorothioate
  modified_base 3: mod_base = OTHER; note = 2'-fluoro guanosine
  modified_base 4: mod_base = OTHER; note = 2'O-methyl adenosine
  modified_base 5: mod_base = OTHER; note = 2'-fluoro guanosine
  modified_base 6: mod_base = OTHER; note = 2'O-methyl adenosine
  modified_base 7: mod_base = OTHER; note = 2'-fluoro adenosine
  modified_base 8: mod_base = OTHER; note = 2'O-methyl guanosine
  modified_base 9: mod_base = OTHER; note = 2'-fluoro guanosine
  modified_base 10: mod_base = OTHER; note = 2'O-methyl guanosine
  modified_base 11: mod_base = OTHER; note = 2'-fluoro cytidine
  modified_base 12: mod_base = OTHER; note = 2'O-methyl adenosine
  modified_base 13: mod_base = OTHER; note = 2'-fluoro uridine
  modified_base 14: mod_base = OTHER; note = 2'O-methyl cytidine
  modified_base 15: mod_base = OTHER; note = 2'-fluoro uridine
  modified_base 16: mod_base = OTHER; note = 2'O-methyl guanosine
  modified_base 17: mod_base = OTHER; note = 2'-fluoro cytidine
  modified_base 18: mod_base = OTHER; note = 2'O-methyl adenosine
  modified_base 19: mod_base = OTHER; note = 2'-fluoro adenosine phosphorothioate
  modified_base 20: mod_base = OTHER; note = 2'O-methyl uridine phosphorothioate
  modified_base 21: mod_base = OTHER; note = 2'O-methyl uridine
aagagaagggcatctgcaatt

SEQ ID NO: 1117 - RNA, 21 nt, synthetic construct
  source 1..21: mol_type = other RNA
  modified_base 1: mod_base = OTHER; note = 2'-fluoro adenosine phosphorothioate
  modified_base 2: mod_base = OTHER; note = 2'O-methyl guanosine phosphorothioate
  modified_base 3: mod_base = OTHER; note = 2'-fluoro adenosine
  modified_base 4: mod_base = OTHER; note = 2'O-methyl adenosine
  modified_base 5: mod_base = OTHER; note = 2'-fluoro guanosine
  modified_base 6: mod_base = OTHER; note = 2'O-methyl guanosine
  modified_base 7: mod_base = OTHER; note = 2'-fluoro guanosine
  modified_base 8: mod_base = OTHER; note = 2'O-methyl cytidine
  modified_base 9: mod_base = OTHER; note = 2'-fluoro adenosine
  modified_base 10: mod_base = OTHER; note = 2'O-methyl uridine
  modified_base 11: mod_base = OTHER; note = 2'-fluoro cytidine
  modified_base 12: mod_base = OTHER; note = 2'O-methyl uridine
  modified_base 13: mod_base = OTHER; note = 2'-fluoro guanosine
  modified_base 14: mod_base = OTHER; note = 2'O-methyl cytidine
  modified_base 15: mod_base = OTHER; note = 2'-fluoro adenosine
  modified_base 16: mod_base = OTHER; note = 2'O-methyl adenosine
  modified_base 17: mod_base = OTHER; note = 2'-fluoro cytidine
  modified_base 18: mod_base = OTHER; note = 2'O-methyl adenosine
  modified_base 19: mod_base = OTHER; note = 2'-fluoro guanosine phosphorothioate
  modified_base 20: mod_base = OTHER; note = 2'O-methyl uridine phosphorothioate
  modified_base 21: mod_base = OTHER; note = 2'O-methyl uridine
agaagggcatctgcaacagtt

SEQ ID NO: 1118 - RNA, 21 nt, synthetic construct
  source 1..21: mol_type = other RNA
  modified_base 1: mod_base = OTHER; note = 2'-fluoro adenosine phosphorothioate
  modified_base 2: mod_base = OTHER; note = 2'O-methyl guanosine phosphorothioate
  modified_base 3: mod_base = OTHER; note = 2'-fluoro guanosine
  modified_base 4: mod_base = OTHER; note = 2'O-methyl guanosine
  modified_base 5: mod_base = OTHER; note = 2'-fluoro cytidine
  modified_base 6: mod_base = OTHER; note = 2'O-methyl adenosine
  modified_base 7: mod_base = OTHER; note = 2'-fluoro uridine
  modified_base 8: mod_base = OTHER; note = 2'O-methyl cytidine
  modified_base 9: mod_base = OTHER; note = 2'-fluoro uridine
  modified_base 10: mod_base = OTHER; note = 2'O-methyl guanosine
  modified_base 11: mod_base = OTHER; note = 2'-fluoro cytidine
  modified_base 12: mod_base = OTHER; note = 2'O-methyl adenosine
  modified_base 13: mod_base = OTHER; note = 2'-fluoro adenosine
  modified_base 14: mod_base = OTHER; note = 2'O-methyl cytidine
  modified_base 15: mod_base = OTHER; note = 2'-fluoro adenosine
  modified_base 16: mod_base = OTHER; note = 2'O-methyl guanosine
  modified_base 17: mod_base = OTHER; note = 2'-fluoro guanosine
  modified_base 18: mod_base = OTHER; note = 2'O-methyl cytidine
  modified_base 19: mod_base = OTHER; note = 2'-fluoro cytidine phosphorothioate
  modified_base 20: mod_base = OTHER; note = 2'O-methyl uridine phosphorothioate
  modified_base 21: mod_base = OTHER; note = 2'O-methyl uridine
agggcatctgcaacaggcctt

SEQ ID NO: 1119 - RNA, 21 nt, synthetic construct
  source 1..21: mol_type = other RNA
  modified_base 1: mod_base = OTHER; note = 2'-fluoro guanosine phosphorothioate
  modified_base 2: mod_base = OTHER; note = 2'O-methyl cytidine phosphorothioate
  modified_base 3: mod_base = OTHER; note = 2'-fluoro adenosine
  modified_base 4: mod_base = OTHER; note = 2'O-methyl uridine
  modified_base 5: mod_base = OTHER; note = 2'-fluoro cytidine
  modified_base 6: mod_base = OTHER; note = 2'O-methyl uridine
  modified_base 7: mod_base = OTHER; note = 2'-fluoro guanosine
  modified_base 8: mod_base = OTHER; note = 2'O-methyl cytidine
  modified_base 9: mod_base = OTHER; note = 2'-fluoro adenosine
  modified_base 10: mod_base = OTHER; note = 2'O-methyl adenosine
  modified_base 11: mod_base = OTHER; note = 2'-fluoro cytidine
  modified_base 12: mod_base = OTHER; note = 2'O-methyl adenosine
  modified_base 13: mod_base = OTHER; note = 2'-fluoro guanosine
  modified_base 14: mod_base = OTHER; note = 2'O-methyl guanosine
  modified_base 15: mod_base = OTHER; note = 2'-fluoro cytidine
  modified_base 16: mod_base = OTHER; note = 2'O-methyl cytidine
  modified_base 17: mod_base = OTHER; note = 2'-fluoro cytidine
  modified_base 18: mod_base = OTHER; note = 2'O-methyl cytidine
  modified_base 19: mod_base = OTHER; note = 2'-fluoro adenosine phosphorothioate
  modified_base 20: mod_base = OTHER; note = 2'O-methyl uridine phosphorothioate
  modified_base 21: mod_base = OTHER; note = 2'O-methyl uridine
gcatctgcaacaggccccatt

SEQ ID NO: 1120 - RNA, 21 nt, synthetic construct
  source 1..21: mol_type = other RNA
  modified_base 1: mod_base = OTHER; note = 2'-fluoro cytidine phosphorothioate
  modified_base 2: mod_base = OTHER; note = 2'O-methyl adenosine phosphorothioate
  modified_base 3: mod_base = OTHER; note = 2'-fluoro guanosine
  modified_base 4: mod_base = OTHER; note = 2'O-methyl cytidine
  modified_base 5: mod_base = OTHER; note = 2'-fluoro adenosine
  modified_base 6: mod_base = OTHER; note = 2'O-methyl cytidine
  modified_base 7: mod_base = OTHER; note = 2'-fluoro uridine
  modified_base 8: mod_base = OTHER; note = 2'O-methyl guanosine
  modified_base 9: mod_base = OTHER; note = 2'-fluoro adenosine
  modified_base 10: mod_base = OTHER; note = 2'O-methyl guanosine
  modified_base 11: mod_base = OTHER; note = 2'-fluoro uridine
  modified_base 12: mod_base = OTHER; note = 2'O-methyl guanosine
  modified_base 13: mod_base = OTHER; note = 2'-fluoro adenosine
  modified_base 14: mod_base = OTHER; note = 2'O-methyl adenosine
  modified_base 15: mod_base = OTHER; note = 2'-fluoro guanosine
  modified_base 16: mod_base = OTHER; note = 2'O-methyl adenosine
  modified_base 17: mod_base = OTHER; note = 2'-fluoro adenosine
  modified_base 18: mod_base = OTHER; note = 2'O-methyl adenosine
  modified_base 19: mod_base = OTHER; note = 2'-fluoro uridine phosphorothioate
  modified_base 20: mod_base = OTHER; note = 2'O-methyl uridine phosphorothioate
  modified_base 21: mod_base = OTHER; note = 2'O-methyl uridine
cagcactgagtgaagaaattt

SEQ ID NO: 1121 - RNA, 21 nt, synthetic construct
  source 1..21: mol_type = other RNA
  modified_base 1: mod_base = OTHER; note = 2'-fluoro uridine phosphorothioate
  modified_base 2: mod_base = OTHER; note = 2'O-methyl uridine phosphorothioate
  modified_base 3: mod_base = OTHER; note = 2'-fluoro guanosine
  modified_base 4: mod_base = OTHER; note = 2'O-methyl cytidine
  modified_base 5: mod_base = OTHER; note = 2'-fluoro adenosine
  modified_base 6: mod_base = OTHER; note = 2'O-methyl adenosine
  modified_base 7: mod_base = OTHER; note = 2'-fluoro cytidine
  modified_base 8: mod_base = OTHER; note = 2'O-methyl uridine
  modified_base 9: mod_base = OTHER; note = 2'-fluoro uridine
  modified_base 10: mod_base = OTHER; note = 2'O-methyl guanosine
  modified_base 11: mod_base = OTHER; note = 2'-fluoro cytidine
  modified_base 12: mod_base = OTHER; note = 2'O-methyl uridine
  modified_base 13: mod_base = OTHER; note = 2'-fluoro adenosine
  modified_base 14: mod_base = OTHER; note = 2'O-methyl cytidine
  modified_base 15: mod_base = OTHER; note = 2'-fluoro cytidine
  modified_base 16: mod_base = OTHER; note = 2'O-methyl cytidine
  modified_base 17: mod_base = OTHER; note = 2'-fluoro adenosine
  modified_base 18: mod_base = OTHER; note = 2'O-methyl uridine
  modified_base 19: mod_base = OTHER; note = 2'-fluoro uridine phosphorothioate
  modified_base 20: mod_base = OTHER; note = 2'O-methyl uridine phosphorothioate
  modified_base 21: mod_base = OTHER; note = 2'O-methyl uridine
ttgcaacttgctacccatttt

SEQ ID NO: 1122 - RNA, 21 nt, synthetic construct
  source 1..21: mol_type = other RNA
  modified_base 1: mod_base = OTHER; note = 2'-fluoro guanosine phosphorothioate
  modified_base 2: mod_base = OTHER; note = 2'O-methyl cytidine phosphorothioate
  modified_base 3: mod_base = OTHER; note = 2'-fluoro uridine
  modified_base 4: mod_base = OTHER; note = 2'O-methyl adenosine
  modified_base 5: mod_base = OTHER; note = 2'-fluoro cytidine
  modified_base 6: mod_base = OTHER; note = 2'O-methyl cytidine
  modified_base 7: mod_base = OTHER; note = 2'-fluoro cytidine
  modified_base 8: mod_base = OTHER; note = 2'O-methyl adenosine
  modified_base 9: mod_base = OTHER; note = 2'-fluoro uridine
  modified_base 10: mod_base = OTHER; note = 2'O-methyl uridine
  modified_base 11: mod_base = OTHER; note = 2'-fluoro adenosine
  modified_base 12: mod_base = OTHER; note = 2'O-methyl guanosine
  modified_base 13: mod_base = OTHER; note = 2'-fluoro guanosine
  modified_base 14: mod_base = OTHER; note = 2'O-methyl adenosine
  modified_base 15: mod_base = OTHER; note = 2'-fluoro uridine
  modified_base 16: mod_base = OTHER; note = 2'O-methyl adenosine
  modified_base 17: mod_base = OTHER; note = 2'-fluoro adenosine
  modified_base 18: mod_base = OTHER; note = 2'O-methyl uridine
  modified_base 19: mod_base = OTHER; note = 2'-fluoro guanosine phosphorothioate
  modified_base 20: mod_base = OTHER; note = 2'O-methyl uridine phosphorothioate
  modified_base 21: mod_base = OTHER; note = 2'O-methyl uridine
gctacccattaggataatgtt

SEQ ID NO: 1123 - RNA, 21 nt, synthetic construct
  source 1..21: mol_type = other RNA
  modified_base 1: mod_base = OTHER; note = 2'-fluoro adenosine phosphorothioate
  modified_base 2: mod_base = OTHER; note = 2'O-methyl cytidine phosphorothioate
  modified_base 3: mod_base = OTHER; note = 2'-fluoro cytidine
  modified_base 4: mod_base = OTHER; note = 2'O-methyl cytidine
  modified_base 5: mod_base = OTHER; note = 2'-fluoro adenosine
  modified_base 6: mod_base = OTHER; note = 2'O-methyl uridine
  modified_base 7: mod_base = OTHER; note = 2'-fluoro uridine
  modified_base 8: mod_base = OTHER; note = 2'O-methyl adenosine
  modified_base 9: mod_base = OTHER; note = 2'-fluoro guanosine
  modified_base 10: mod_base = OTHER; note = 2'O-methyl guanosine
  modified_base 11: mod_base = OTHER; note = 2'-fluoro adenosine
  modified_base 12: mod_base = OTHER; note = 2'O-methyl uridine
  modified_base 13: mod_base = OTHER; note = 2'-fluoro adenosine
  modified_base 14: mod_base = OTHER; note = 2'O-methyl adenosine
  modified_base 15: mod_base = OTHER; note = 2'-fluoro uridine
  modified_base 16: mod_base = OTHER; note = 2'O-methyl guanosine
  modified_base 17: mod_base = OTHER; note = 2'-fluoro uridine
  modified_base 18: mod_base = OTHER; note = 2'O-methyl cytidine
  modified_base 19: mod_base = OTHER; note = 2'-fluoro uridine phosphorothioate
  modified_base 20: mod_base = OTHER; note = 2'O-methyl uridine phosphorothioate
  modified_base 21: mod_base = OTHER; note = 2'O-methyl uridine
acccattaggataatgtcttt

SEQ ID NO: 1124 - RNA, 21 nt, synthetic construct
  source 1..21: mol_type = other RNA
  modified_base 1: mod_base = OTHER; note = 2'-fluoro cytidine phosphorothioate
  modified_base 2: mod_base = OTHER; note = 2'O-methyl cytidine phosphorothioate
  modified_base 3: mod_base = OTHER; note = 2'-fluoro cytidine
  modified_base 4: mod_base = OTHER; note = 2'O-methyl adenosine
  modified_base 5: mod_base = OTHER; note = 2'-fluoro uridine
  modified_base 6: mod_base = OTHER; note = 2'O-methyl uridine
  modified_base 7: mod_base = OTHER; note = 2'-fluoro adenosine
  modified_base 8: mod_base = OTHER; note = 2'O-methyl guanosine
  modified_base 9: mod_base = OTHER; note = 2'-fluoro guanosine
  modified_base 10: mod_base = OTHER; note = 2'O-methyl adenosine
  modified_base 11: mod_base = OTHER; note = 2'-fluoro uridine
  modified_base 12: mod_base = OTHER; note = 2'O-methyl adenosine
  modified_base 13: mod_base = OTHER; note = 2'-fluoro adenosine
  modified_base 14: mod_base = OTHER; note = 2'O-methyl uridine
  modified_base 15: mod_base = OTHER; note = 2'-fluoro guanosine
  modified_base 16: mod_base = OTHER; note = 2'O-methyl uridine
  modified_base 17: mod_base = OTHER; note = 2'-fluoro cytidine
  modified_base 18: mod_base = OTHER; note = 2'O-methyl uridine
  modified_base 19: mod_base = OTHER; note = 2'-fluoro uridine phosphorothioate
  modified_base 20: mod_base = OTHER; note = 2'O-methyl uridine phosphorothioate
  modified_base 21: mod_base = OTHER; note = 2'O-methyl uridine
cccattaggataatgtctttt

SEQ ID NO: 1125 - RNA, 21 nt, synthetic construct
  source 1..21: mol_type = other RNA
  modified_base 1: mod_base = OTHER; note = 2'-fluoro cytidine phosphorothioate
  modified_base 2: mod_base = OTHER; note = 2'O-methyl adenosine phosphorothioate
  modified_base 3: mod_base = OTHER; note = 2'-fluoro uridine
  modified_base 4: mod_base = OTHER; note = 2'O-methyl uridine
  modified_base 5: mod_base = OTHER; note = 2'-fluoro adenosine
  modified_base 6: mod_base = OTHER; note = 2'O-methyl guanosine
  modified_base 7: mod_base = OTHER; note = 2'-fluoro guanosine
  modified_base 8: mod_base = OTHER; note = 2'O-methyl adenosine
  modified_base 9: mod_base = OTHER; note = 2'-fluoro uridine
  modified_base 10: mod_base = OTHER; note = 2'O-methyl adenosine
  modified_base 11: mod_base = OTHER; note = 2'-fluoro adenosine
  modified_base 12: mod_base = OTHER; note = 2'O-methyl uridine
  modified_base 13: mod_base = OTHER; note = 2'-fluoro guanosine
  modified_base 14: mod_base = OTHER; note = 2'O-methyl uridine
  modified_base 15: mod_base = OTHER; note = 2'-fluoro cytidine
  modified_base 16: mod_base = OTHER; note = 2'O-methyl uridine
  modified_base 17: mod_base = OTHER; note = 2'-fluoro uridine
  modified_base 18: mod_base = OTHER; note = 2'O-methyl adenosine
  modified_base 19: mod_base = OTHER; note = 2'-fluoro uridine phosphorothioate
  modified_base 20: mod_base = OTHER; note = 2'O-methyl uridine phosphorothioate
  modified_base 21: mod_base = OTHER; note = 2'O-methyl uridine
cattaggataatgtcttattt

SEQ ID NO: 1126 - RNA, 21 nt, synthetic construct
  source 1..21: mol_type = other RNA
  modified_base 1: mod_base = OTHER; note = 2'-fluoro uridine phosphorothioate
  modified_base 2: mod_base = OTHER; note = 2'O-methyl guanosine phosphorothioate
  modified_base 3: mod_base = OTHER; note = 2'-fluoro cytidine
  modified_base 4: mod_base = OTHER; note = 2'O-methyl uridine
  modified_base 5: mod_base = OTHER; note = 2'-fluoro guanosine
  modified_base 6: mod_base = OTHER; note = 2'O-methyl cytidine
  modified_base 7: mod_base = OTHER; note = 2'-fluoro cytidine
  modified_base 8: mod_base = OTHER; note = 2'O-methyl cytidine
  modified_base 9: mod_base = OTHER; note = 2'-fluoro uridine
  modified_base 10: mod_base = OTHER; note = 2'O-methyl guanosine
  modified_base 11: mod_base = OTHER; note = 2'-fluoro uridine
  modified_base 12: mod_base = OTHER; note = 2'O-methyl adenosine
  modified_base 13: mod_base = OTHER; note = 2'-fluoro cytidine
  modified_base 14: mod_base = OTHER; note = 2'O-methyl cytidine
  modified_base 15: mod_base = OTHER; note = 2'-fluoro cytidine
  modified_base 16: mod_base = OTHER; note = 2'O-methyl uridine
  modified_base 17: mod_base = OTHER; note = 2'-fluoro guanosine
  modified_base 18: mod_base = OTHER; note = 2'O-methyl cytidine
  modified_base 19: mod_base = OTHER; note = 2'-fluoro cytidine phosphorothioate
  modified_base 20: mod_base = OTHER; note = 2'O-methyl uridine phosphorothioate
  modified_base 21: mod_base = OTHER; note = 2'O-methyl uridine
tgctgccctgtaccctgcctt

SEQ ID NO: 1127 - RNA, 21 nt, synthetic construct
  source 1..21: mol_type = other RNA
  modified_base 1: mod_base = OTHER; note = 2'-fluoro guanosine phosphorothioate
  modified_base 2: mod_base = OTHER; note = 2'O-methyl cytidine phosphorothioate
  modified_base 3: mod_base = OTHER; note = 2'-fluoro cytidine
  modified_base 4: mod_base = OTHER; note = 2'O-methyl cytidine
  modified_base 5: mod_base = OTHER; note = 2'-fluoro uridine
  modified_base 6: mod_base = OTHER; note = 2'O-methyl guanosine
  modified_base 7: mod_base = OTHER; note = 2'-fluoro uridine
  modified_base 8: mod_base = OTHER; note = 2'O-methyl adenosine
  modified_base 9: mod_base = OTHER; note = 2'-fluoro cytidine
  modified_base 10: mod_base = OTHER; note = 2'O-methyl cytidine
  modified_base 11: mod_base = OTHER; note = 2'-fluoro cytidine
  modified_base 12: mod_base = OTHER; note = 2'O-methyl uridine
  modified_base 13: mod_base = OTHER; note = 2'-fluoro guanosine
  modified_base 14: mod_base = OTHER; note = 2'O-methyl cytidine
  modified_base 15: mod_base = OTHER; note = 2'-fluoro cytidine
  modified_base 16: mod_base = OTHER; note = 2'O-methyl uridine
  modified_base 17: mod_base = OTHER; note = 2'-fluoro guanosine
  modified_base 18: mod_base = OTHER; note = 2'O-methyl uridine
  modified_base 19: mod_base = OTHER; note = 2'-fluoro guanosine phosphorothioate
  modified_base 20: mod_base = OTHER; note = 2'O-methyl uridine phosphorothioate
  modified_base 21: mod_base = OTHER; note = 2'O-methyl uridine
gccctgtaccctgcctgtgtt

SEQ ID NO: 1128 - RNA, 21 nt, synthetic construct
  source 1..21: mol_type = other RNA
  modified_base 1: mod_base = OTHER; note = 2'-fluoro cytidine phosphorothioate
  modified_base 2: mod_base = OTHER; note = 2'O-methyl cytidine phosphorothioate
  modified_base 3: mod_base = OTHER; note = 2'-fluoro uridine
  modified_base 4: mod_base = OTHER; note = 2'O-methyl guanosine
  modified_base 5: mod_base = OTHER; note = 2'-fluoro cytidine
  modified_base 6: mod_base = OTHER; note = 2'O-methyl cytidine
  modified_base 7: mod_base = OTHER; note = 2'-fluoro uridine
  modified_base 8: mod_base = OTHER; note = 2'O-methyl guanosine
  modified_base 9: mod_base = OTHER; note = 2'-fluoro uridine
  modified_base 10: mod_base = OTHER; note = 2'O-methyl guanosine
  modified_base 11: mod_base = OTHER; note = 2'-fluoro guanosine
  modified_base 12: mod_base = OTHER; note = 2'O-methyl adenosine
  modified_base 13: mod_base = OTHER; note = 2'-fluoro adenosine
  modified_base 14: mod_base = OTHER; note = 2'O-methyl uridine
  modified_base 15: mod_base = OTHER; note = 2'-fluoro cytidine
  modified_base 16: mod_base = OTHER; note = 2'O-methyl uridine
  modified_base 17: mod_base = OTHER; note = 2'-fluoro guanosine
  modified_base 18: mod_base = OTHER; note = 2'O-methyl cytidine
  modified_base 19: mod_base = OTHER; note = 2'-fluoro cytidine phosphorothioate
  modified_base 20: mod_base = OTHER; note = 2'O-methyl uridine phosphorothioate
  modified_base 21: mod_base = OTHER; note = 2'O-methyl uridine
cctgcctgtggaatctgcctt

SEQ ID NO: 1129 - RNA, 21 nt, synthetic construct
  source 1..21: mol_type = other RNA
  modified_base 1: mod_base = OTHER; note = 2'-fluoro guanosine phosphorothioate
  modified_base 2: mod_base = OTHER; note = 2'O-methyl cytidine phosphorothioate
  modified_base 3: mod_base = OTHER; note = 2'-fluoro cytidine
  modified_base 4: mod_base = OTHER; note = 2'O-methyl uridine
  modified_base 5: mod_base = OTHER; note = 2'-fluoro guanosine
  modified_base 6: mod_base = OTHER; note = 2'O-methyl uridine
  modified_base 7: mod_base = OTHER; note = 2'-fluoro guanosine
  modified_base 8: mod_base = OTHER; note = 2'O-methyl guanosine
  modified_base 9: mod_base = OTHER; note = 2'-fluoro adenosine
  modified_base 10: mod_base = OTHER; note = 2'O-methyl adenosine
  modified_base 11: mod_base = OTHER; note = 2'-fluoro uridine
  modified_base 12: mod_base = OTHER; note = 2'O-methyl cytidine
  modified_base 13: mod_base = OTHER; note = 2'-fluoro uridine
  modified_base 14: mod_base = OTHER; note = 2'O-methyl guanosine
  modified_base 15: mod_base = OTHER; note = 2'-fluoro cytidine
  modified_base 16: mod_base = OTHER; note = 2'O-methyl cytidine
  modified_base 17: mod_base = OTHER; note = 2'-fluoro adenosine
  modified_base 18: mod_base = OTHER; note = 2'O-methyl uridine
  modified_base 19: mod_base = OTHER; note = 2'-fluoro uridine phosphorothioate
  modified_base 20: mod_base = OTHER; note = 2'O-methyl uridine phosphorothioate
  modified_base 21: mod_base = OTHER; note = 2'O-methyl uridine
gcctgtggaatctgccatttt

SEQ ID NO: 1130 - RNA, 21 nt, synthetic construct
  source 1..21: mol_type = other RNA
  modified_base 1: mod_base = OTHER; note = 2'-fluoro adenosine phosphorothioate
  modified_base 2: mod_base = OTHER; note = 2'O-methyl guanosine phosphorothioate
  modified_base 3: mod_base = OTHER; note = 2'-fluoro adenosine
  modified_base 4: mod_base = OTHER; note = 2'O-methyl cytidine
  modified_base 5: mod_base = OTHER; note = 2'-fluoro uridine
  modified_base 6: mod_base = OTHER; note = 2'O-methyl guanosine
  modified_base 7: mod_base = OTHER; note = 2'-fluoro guanosine
  modified_base 8: mod_base = OTHER; note = 2'O-methyl uridine
  modified_base 9: mod_base = OTHER; note = 2'-fluoro guanosine
  modified_base 10: mod_base = OTHER; note = 2'O-methyl adenosine
  modified_base 11: mod_base = OTHER; note = 2'-fluoro cytidine
  modified_base 12: mod_base = OTHER; note = 2'O-methyl adenosine
  modified_base 13: mod_base = OTHER; note = 2'-fluoro uridine
  modified_base 14: mod_base = OTHER; note = 2'O-methyl guanosine
  modified_base 15: mod_base = OTHER; note = 2'-fluoro guanosine
  modified_base 16: mod_base = OTHER; note = 2'O-methyl cytidine
  modified_base 17: mod_base = OTHER; note = 2'-fluoro uridine
  modified_base 18: mod_base = OTHER; note = 2'O-methyl uridine
  modified_base 19: mod_base = OTHER; note = 2'-fluoro cytidine phosphorothioate
  modified_base 20: mod_base = OTHER; note = 2'O-methyl uridine phosphorothioate
  modified_base 21: mod_base = OTHER; note = 2'O-methyl uridine
agactggtgacatggcttctt

SEQ ID NO: 1131 - RNA, 21 nt, synthetic construct
  source 1..21: mol_type = other RNA
  modified_base 1: mod_base = OTHER; note = 2'-fluoro uridine phosphorothioate
  modified_base 2: mod_base = OTHER; note = 2'O-methyl guanosine phosphorothioate
  modified_base 3: mod_base = OTHER; note = 2'-fluoro uridine
  modified_base 4: mod_base = OTHER; note = 2'O-methyl guanosine
  modified_base 5: mod_base = OTHER; note = 2'-fluoro uridine
  modified_base 6: mod_base = OTHER; note = 2'O-methyl cytidine
  modified_base 7: mod_base = OTHER; note = 2'-fluoro uridine
  modified_base 8: mod_base = OTHER; note = 2'O-methyl guanosine
  modified_base 9: mod_base = OTHER; note = 2'-fluoro cytidine
  modified_base 10: mod_base = OTHER; note = 2'O-methyl uridine
  modified_base 11: mod_base = OTHER; note = 2'-fluoro cytidine
  modified_base 12: mod_base = OTHER; note = 2'O-methyl cytidine
  modified_base 13: mod_base = OTHER; note = 2'-fluoro cytidine
  modified_base 14: mod_base = OTHER; note = 2'O-methyl cytidine
  modified_base 15: mod_base = OTHER; note = 2'-fluoro guanosine
  modified_base 16: mod_base = OTHER; note = 2'O-methyl cytidine
  modified_base 17: mod_base = OTHER; note = 2'-fluoro cytidine
  modified_base 18: mod_base = OTHER; note = 2'O-methyl uridine
  modified_base 19: mod_base = OTHER; note = 2'-fluoro cytidine phosphorothioate
  modified_base 20: mod_base = OTHER; note = 2'O-methyl uridine phosphorothioate
  modified_base 21: mod_base = OTHER; note = 2'O-methyl uridine
tgtgtctgctccccgcctctt

SEQ ID NO: 1132 - RNA, 21 nt, synthetic construct
  source 1..21: mol_type = other RNA
  modified_base 1: mod_base = OTHER; note = 2'-fluoro uridine phosphorothioate
  modified_base 2: mod_base = OTHER; note = 2'O-methyl guanosine phosphorothioate
  modified_base 3: mod_base = OTHER; note = 2'-fluoro uridine
  modified_base 4: mod_base = OTHER; note = 2'O-methyl cytidine
  modified_base 5: mod_base = OTHER; note = 2'-fluoro uridine
  modified_base 6: mod_base = OTHER; note = 2'O-methyl guanosine
  modified_base 7: mod_base = OTHER; note = 2'-fluoro cytidine
  modified_base 8: mod_base = OTHER; note = 2'O-methyl uridine
  modified_base 9: mod_base = OTHER; note = 2'-fluoro cytidine
  modified_base 10: mod_base = OTHER; note = 2'O-methyl cytidine
  modified_base 11: mod_base = OTHER; note = 2'-fluoro cytidine
  modified_base 12: mod_base = OTHER; note = 2'O-methyl cytidine
  modified_base 13: mod_base = OTHER; note = 2'-fluoro guanosine
  modified_base 14: mod_base = OTHER; note = 2'O-methyl cytidine
  modified_base 15: mod_base = OTHER; note = 2'-fluoro cytidine
  modified_base 16: mod_base = OTHER; note = 2'O-methyl uridine
  modified_base 17: mod_base = OTHER; note = 2'-fluoro cytidine
  modified_base 18: mod_base = OTHER; note = 2'O-methyl cytidine
  modified_base 19: mod_base = OTHER; note = 2'-fluoro adenosine phosphorothioate
  modified_base 20: mod_base = OTHER; note = 2'O-methyl uridine phosphorothioate
  modified_base 21: mod_base = OTHER; note = 2'O-methyl uridine
tgtctgctccccgcctccatt

SEQ ID NO: 1133 - RNA, 21 nt, synthetic construct
  source 1..21: mol_type = other RNA
  modified_base 1: mod_base = OTHER; note = 2'-fluoro adenosine phosphorothioate
  modified_base 2: mod_base = OTHER; note = 2'O-methyl uridine phosphorothioate
  modified_base 3: mod_base = OTHER; note = 2'-fluoro guanosine
  modified_base 4: mod_base = OTHER; note = 2'O-methyl uridine
  modified_base 5: mod_base = OTHER; note = 2'-fluoro adenosine
  modified_base 6: mod_base = OTHER; note = 2'O-methyl cytidine
  modified_base 7: mod_base = OTHER; note = 2'-fluoro guanosine
  modified_base 8: mod_base = OTHER; note = 2'O-methyl adenosine
  modified_base 9: mod_base = OTHER; note = 2'-fluoro cytidine
  modified_base 10: mod_base = OTHER; note = 2'O-methyl guanosine
  modified_base 11: mod_base = OTHER; note = 2'-fluoro cytidine
  modified_base 12: mod_base = OTHER; note = 2'O-methyl adenosine
  modified_base 13: mod_base = OTHER; note = 2'-fluoro guanosine
  modified_base 14: mod_base = OTHER; note = 2'O-methyl adenosine
  modified_base 15: mod_base = OTHER; note = 2'-fluoro guanosine
  modified_base 16: mod_base = OTHER; note = 2'O-methyl cytidine
  modified_base 17: mod_base = OTHER; note = 2'-fluoro guanosine
  modified_base 18: mod_base = OTHER; note = 2'O-methyl cytidine
  modified_base 19: mod_base = OTHER; note = 2'-fluoro guanosine
  modified_base 20: mod_base = OTHER; note = 2'O-methyl guanosine phosphorothioate
  modified_base 21: mod_base = OTHER; note = 2'-fluoro cytidine
atgtacgacgcagagcgcggc

SEQ ID NO: 1134 - RNA, 21 nt, synthetic construct
  source 1..21: mol_type = other RNA
  modified_base 1: mod_base = OTHER; note = 2'-fluoro guanosine phosphorothioate
  modified_base 2: mod_base = OTHER; note = 2'O-methyl uridine phosphorothioate
  modified_base 3: mod_base = OTHER; note = 2'-fluoro adenosine
  modified_base 4: mod_base = OTHER; note = 2'O-methyl cytidine
  modified_base 5: mod_base = OTHER; note = 2'-fluoro guanosine
  modified_base 6: mod_base = OTHER; note = 2'O-methyl adenosine
  modified_base 7: mod_base = OTHER; note = 2'-fluoro cytidine
  modified_base 8: mod_base = OTHER; note = 2'O-methyl guanosine
  modified_base 9: mod_base = OTHER; note = 2'-fluoro cytidine
  modified_base 10: mod_base = OTHER; note = 2'O-methyl adenosine
  modified_base 11: mod_base = OTHER; note = 2'-fluoro guanosine
  modified_base 12: mod_base = OTHER; note = 2'O-methyl adenosine
  modified_base 13: mod_base = OTHER; note = 2'-fluoro guanosine
  modified_base 14: mod_base = OTHER; note = 2'O-methyl cytidine
  modified_base 15: mod_base = OTHER; note = 2'-fluoro guanosine
  modified_base 16: mod_base = OTHER; note = 2'O-methyl cytidine
  modified_base 17: mod_base = OTHER; note = 2'-fluoro guanosine
  modified_base 18: mod_base = OTHER; note = 2'O-methyl guanosine
  modified_base 19: mod_base = OTHER; note = 2'-fluoro cytidine
  modified_base 20: mod_base = OTHER; note = 2'O-methyl uridine phosphorothioate
  modified_base 21: mod_base = OTHER; note = 2'-fluoro guanosine
gtacgacgcagagcgcggctg

SEQ ID NO: 1135 - RNA, 21 nt, synthetic construct
  source 1..21: mol_type = other RNA
  modified_base 1: mod_base = OTHER; note = 2'-fluoro uridine phosphorothioate
  modified_base 2: mod_base = OTHER; note = 2'O-methyl adenosine phosphorothioate
  modified_base 3: mod_base = OTHER; note = 2'-fluoro cytidine
  modified_base 4: mod_base = OTHER; note = 2'O-methyl guanosine
  modified_base 5: mod_base = OTHER; note = 2'-fluoro adenosine
  modified_base 6: mod_base = OTHER; note = 2'O-methyl cytidine
  modified_base 7: mod_base = OTHER; note = 2'-fluoro guanosine
  modified_base 8: mod_base = OTHER; note = 2'O-methyl cytidine
  modified_base 9: mod_base = OTHER; note = 2'-fluoro adenosine
  modified_base 10: mod_base = OTHER; note = 2'O-methyl guanosine
  modified_base 11: mod_base = OTHER; note = 2'-fluoro adenosine
  modified_base 12: mod_base = OTHER; note = 2'O-methyl guanosine
  modified_base 13: mod_base = OTHER; note = 2'-fluoro cytidine
  modified_base 14: mod_base = OTHER; note = 2'O-methyl guanosine
  modified_base 15: mod_base = OTHER; note = 2'-fluoro cytidine
  modified_base 16: mod_base = OTHER; note = 2'O-methyl guanosine
  modified_base 17: mod_base = OTHER; note = 2'-fluoro guanosine
  modified_base 18: mod_base = OTHER; note = 2'O-methyl cytidine
  modified_base 19: mod_base = OTHER; note = 2'-fluoro uridine
  modified_base 20: mod_base = OTHER; note = 2'O-methyl guanosine phosphorothioate
  modified_base 21: mod_base = OTHER; note = 2'-fluoro guanosine
tacgacgcagagcgcggctgg

SEQ ID NO: 1136 - RNA, 21 nt, synthetic construct
  source 1..21: mol_type = other RNA
  modified_base 1: mod_base = OTHER; note = 2'-fluoro adenosine phosphorothioate
  modified_base 2: mod_base = OTHER; note = 2'O-methyl cytidine phosphorothioate
  modified_base 3: mod_base = OTHER; note = 2'-fluoro guanosine
  modified_base 4: mod_base = OTHER; note = 2'O-methyl adenosine
  modified_base 5: mod_base = OTHER; note = 2'-fluoro cytidine
  modified_base 6: mod_base = OTHER; note = 2'O-methyl guanosine
  modified_base 7: mod_base = OTHER; note = 2'-fluoro cytidine
  modified_base 8: mod_base = OTHER; note = 2'O-methyl adenosine
  modified_base 9: mod_base = OTHER; note = 2'-fluoro guanosine
  modified_base 10: mod_base = OTHER; note = 2'O-methyl adenosine
  modified_base 11: mod_base = OTHER; note = 2'-fluoro guanosine
  modified_base 12: mod_base = OTHER; note = 2'O-methyl cytidine
  modified_base 13: mod_base = OTHER; note = 2'-fluoro guanosine
  modified_base 14: mod_base = OTHER; note = 2'O-methyl cytidine
  modified_base 15: mod_base = OTHER; note = 2'-fluoro guanosine
  modified_base 16: mod_base = OTHER; note = 2'O-methyl guanosine
  modified_base 17: mod_base = OTHER; note = 2'-fluoro cytidine
  modified_base 18: mod_base = OTHER; note = 2'O-methyl uridine
  modified_base 19: mod_base = OTHER; note = 2'-fluoro guanosine
  modified_base 20: mod_base = OTHER; note = 2'O-methyl guanosine phosphorothioate
  modified_base 21: mod_base = OTHER; note = 2'-fluoro adenosine
acgacgcagagcgcggctgga

SEQ ID NO: 1137 - RNA, 21 nt, synthetic construct
  source 1..21: mol_type = other RNA
  modified_base 1: mod_base = OTHER; note = 2'-fluoro adenosine phosphorothioate
  modified_base 2: mod_base = OTHER; note = 2'O-methyl cytidine phosphorothioate
  modified_base 3: mod_base = OTHER; note = 2'-fluoro guanosine
  modified_base 4: mod_base = OTHER; note = 2'O-methyl cytidine
  modified_base 5: mod_base = OTHER; note = 2'-fluoro adenosine
  modified_base 6: mod_base = OTHER; note = 2'O-methyl guanosine
  modified_base 7: mod_base = OTHER; note = 2'-fluoro adenosine
  modified_base 8: mod_base = OTHER; note = 2'O-methyl guanosine
  modified_base 9: mod_base = OTHER; note = 2'-fluoro cytidine
  modified_base 10: mod_base = OTHER; note = 2'O-methyl guanosine
  modified_base 11: mod_base = OTHER; note = 2'-fluoro cytidine
  modified_base 12: mod_base = OTHER; note = 2'O-methyl guanosine
  modified_base 13: mod_base = OTHER; note = 2'-fluoro guanosine
  modified_base 14: mod_base = OTHER; note = 2'O-methyl cytidine
  modified_base 15: mod_base = OTHER; note = 2'-fluoro uridine
  modified_base 16: mod_base = OTHER; note = 2'O-methyl guanosine
  modified_base 17: mod_base = OTHER; note = 2'-fluoro guanosine
  modified_base 18: mod_base = OTHER; note = 2'O-methyl adenosine
  modified_base 19: mod_base = OTHER; note = 2'-fluoro guanosine
  modified_base 20: mod_base = OTHER; note = 2'O-methyl cytidine phosphorothioate
  modified_base 21: mod_base = OTHER; note = 2'-fluoro uridine
acgcagagcgcggctggagct

SEQ ID NO: 1138 - RNA, 21 nt, synthetic construct
  source 1..21: mol_type = other RNA
  modified_base 1: mod_base = OTHER; note = 2'-fluoro cytidine phosphorothioate
  modified_base 2: mod_base = OTHER; note = 2'O-methyl guanosine phosphorothioate
  modified_base 3: mod_base = OTHER; note = 2'-fluoro cytidine
  modified_base 4: mod_base = OTHER; note = 2'O-methyl adenosine
  modified_base 5: mod_base = OTHER; note = 2'-fluoro guanosine
  modified_base 6: mod_base = OTHER; note = 2'O-methyl adenosine
  modified_base 7: mod_base = OTHER; note = 2'-fluoro guanosine
  modified_base 8: mod_base = OTHER; note = 2'O-methyl cytidine
  modified_base 9: mod_base = OTHER; note = 2'-fluoro guanosine
  modified_base 10: mod_base = OTHER; note = 2'O-methyl cytidine
  modified_base 11: mod_base = OTHER; note = 2'-fluoro guanosine
  modified_base 12: mod_base = OTHER; note = 2'O-methyl guanosine
  modified_base 13: mod_base = OTHER; note = 2'-fluoro cytidine
  modified_base 14: mod_base = OTHER; note = 2'O-methyl uridine
  modified_base 15: mod_base = OTHER; note = 2'-fluoro guanosine
  modified_base 16: mod_base = OTHER; note = 2'O-methyl guanosine
  modified_base 17: mod_base = OTHER; note = 2'-fluoro adenosine
  modified_base 18: mod_base = OTHER; note = 2'O-methyl guanosine
  modified_base 19: mod_base = OTHER; note = 2'-fluoro cytidine
  modified_base 20: mod_base = OTHER; note = 2'O-methyl uridine phosphorothioate
  modified_base 21: mod_base = OTHER; note = 2'-fluoro uridine
cgcagagcgcggctggagctt

SEQ ID NO: 1139 - RNA, 21 nt, synthetic construct
  source 1..21: mol_type = other RNA
  modified_base 1: mod_base = OTHER; note = 2'-fluoro guanosine phosphorothioate
  modified_base 2: mod_base = OTHER; note = 2'O-methyl cytidine phosphorothioate
  modified_base 3: mod_base = OTHER; note = 2'-fluoro adenosine
  modified_base 4: mod_base = OTHER; note = 2'O-methyl guanosine
  modified_base 5: mod_base = OTHER; note = 2'-fluoro adenosine
  modified_base 6: mod_base = OTHER; note = 2'O-methyl guanosine
  modified_base 7: mod_base = OTHER; note = 2'-fluoro cytidine
  modified_base 8: mod_base = OTHER; note = 2'O-methyl guanosine
  modified_base 9: mod_base = OTHER; note = 2'-fluoro cytidine
  modified_base 10: mod_base = OTHER; note = 2'O-methyl guanosine
  modified_base 11: mod_base = OTHER; note = 2'-fluoro guanosine
  modified_base 12: mod_base = OTHER; note = 2'O-methyl cytidine
  modified_base 13: mod_base = OTHER; note = 2'-fluoro uridine
  modified_base 14: mod_base = OTHER; note = 2'O-methyl guanosine
  modified_base 15: mod_base = OTHER; note = 2'-fluoro guanosine
  modified_base 16: mod_base = OTHER; note = 2'O-methyl adenosine
  modified_base 17: mod_base = OTHER; note = 2'-fluoro guanosine
  modified_base 18: mod_base = OTHER; note = 2'O-methyl cytidine
  modified_base 19: mod_base = OTHER; note = 2'-fluoro uridine
  modified_base 20: mod_base = OTHER; note = 2'O-methyl uridine phosphorothioate
  modified_base 21: mod_base = OTHER; note = 2'-fluoro guanosine
gcagagcgcggctggagcttg

SEQ ID NO: 1140 - RNA, 21 nt, synthetic construct
  source 1..21: mol_type = other RNA
  modified_base 1: mod_base = OTHER; note = 2'-fluoro cytidine phosphorothioate
  modified_base 2: mod_base = OTHER; note = 2'O-methyl adenosine phosphorothioate
  modified_base 3: mod_base = OTHER; note = 2'-fluoro guanosine
  modified_base 4: mod_base = OTHER; note = 2'O-methyl adenosine
  modified_base 5: mod_base = OTHER; note = 2'-fluoro guanosine
  modified_base 6: mod_base = OTHER; note = 2'O-methyl cytidine
  modified_base 7: mod_base = OTHER; note = 2'-fluoro guanosine
  modified_base 8: mod_base = OTHER; note = 2'O-methyl cytidine
  modified_base 9: mod_base = OTHER; note = 2'-fluoro guanosine
  modified_base 10: mod_base = OTHER; note = 2'O-methyl guanosine
  modified_base 11: mod_base = OTHER; note = 2'-fluoro cytidine
  modified_base 12: mod_base = OTHER; note = 2'O-methyl uridine
  modified_base 13: mod_base = OTHER; note = 2'-fluoro guanosine
  modified_base 14: mod_base = OTHER; note = 2'O-methyl guanosine
  modified_base 15: mod_base = OTHER; note = 2'-fluoro adenosine
  modified_base 16: mod_base = OTHER; note = 2'O-methyl guanosine
  modified_base 17: mod_base = OTHER; note = 2'-fluoro cytidine
  modified_base 18: mod_base = OTHER; note = 2'O-methyl uridine
  modified_base 19: mod_base = OTHER; note = 2'-fluoro uridine
  modified_base 20: mod_base = OTHER; note = 2'O-methyl guanosine phosphorothioate
  modified_base 21: mod_base = OTHER; note = 2'-fluoro uridine
cagagcgcggctggagcttgt

SEQ ID NO: 1141 - RNA, 21 nt, synthetic construct
  source 1..21: mol_type = other RNA
  modified_base 1: mod_base = OTHER; note = 2'-fluoro adenosine phosphorothioate
  modified_base 2: mod_base = OTHER; note = 2'O-methyl guanosine phosphorothioate
  modified_base 3: mod_base = OTHER; note = 2'-fluoro adenosine
  modified_base 4: mod_base = OTHER; note = 2'O-methyl guanosine
  modified_base 5: mod_base = OTHER; note = 2'-fluoro cytidine
  modified_base 6: mod_base = OTHER; note = 2'O-methyl guanosine
  modified_base 7: mod_base = OTHER; note = 2'-fluoro cytidine
  modified_base 8: mod_base = OTHER; note = 2'O-methyl guanosine
  modified_base 9: mod_base = OTHER; note = 2'-fluoro guanosine
  modified_base 10: mod_base = OTHER; note = 2'O-methyl cytidine
  modified_base 11: mod_base = OTHER; note = 2'-fluoro uridine
  modified_base 12: mod_base = OTHER; note = 2'O-methyl guanosine
  modified_base 13: mod_base = OTHER; note = 2'-fluoro guanosine
  modified_base 14: mod_base = OTHER; note = 2'O-methyl adenosine
  modified_base 15: mod_base = OTHER; note = 2'-fluoro guanosine
  modified_base 16: mod_base = OTHER; note = 2'O-methyl cytidine
  modified_base 17: mod_base = OTHER; note = 2'-fluoro uridine
  modified_base 18: mod_base = OTHER; note = 2'O-methyl uridine
  modified_base 19: mod_base = OTHER; note = 2'-fluoro guanosine
  modified_base 20: mod_base = OTHER; note = 2'O-methyl uridine phosphorothioate
  modified_base 21: mod_base = OTHER; note = 2'-fluoro cytidine
agagcgcggctggagcttgtc

SEQ ID NO: 1142 - RNA, 21 nt, synthetic construct
  source 1..21: mol_type = other RNA
  modified_base 1: mod_base = OTHER; note = 2'-fluoro guanosine phosphorothioate
  modified_base 2: mod_base = OTHER; note = 2'O-methyl adenosine phosphorothioate
  modified_base 3: mod_base = OTHER; note = 2'-fluoro guanosine
  modified_base 4: mod_base = OTHER; note = 2'O-methyl cytidine
  modified_base 5: mod_base = OTHER; note = 2'-fluoro guanosine
  modified_base 6: mod_base = OTHER; note = 2'O-methyl cytidine
  modified_base 7: mod_base = OTHER; note = 2'-fluoro guanosine
  modified_base 8: mod_base = OTHER; note = 2'O-methyl guanosine
  modified_base 9: mod_base = OTHER; note = 2'-fluoro cytidine
  modified_base 10: mod_base = OTHER; note = 2'O-methyl uridine
  modified_base 11: mod_base = OTHER; note = 2'-fluoro guanosine
  modified_base 12: mod_base = OTHER; note = 2'O-methyl guanosine
  modified_base 13: mod_base = OTHER; note = 2'-fluoro adenosine
  modified_base 14: mod_base = OTHER; note = 2'O-methyl guanosine
  modified_base 15: mod_base = OTHER; note = 2'-fluoro cytidine
  modified_base 16: mod_base = OTHER; note = 2'O-methyl uridine
  modified_base 17: mod_base = OTHER; note = 2'-fluoro uridine
  modified_base 18: mod_base = OTHER; note = 2'O-methyl guanosine
  modified_base 19: mod_base = OTHER; note = 2'-fluoro uridine
  modified_base 20: mod_base = OTHER; note = 2'O-methyl cytidine phosphorothioate
  modified_base 21: mod_base = OTHER; note = 2'-fluoro cytidine
gagcgcggctggagcttgtcc

SEQ ID NO: 1143 - RNA, 21 nt, synthetic construct
  source 1..21: mol_type = other RNA
  modified_base 1: mod_base = OTHER; note = 2'-fluoro guanosine phosphorothioate
  modified_base 2: mod_base = OTHER; note = 2'O-methyl cytidine phosphorothioate
  modified_base 3: mod_base = OTHER; note = 2'-fluoro guanosine
  modified_base 4: mod_base = OTHER; note = 2'O-methyl cytidine
  modified_base 5: mod_base = OTHER; note = 2'-fluoro guanosine
  modified_base 6: mod_base = OTHER; note = 2'O-methyl guanosine
  modified_base 7: mod_base = OTHER; note = 2'-fluoro cytidine
  modified_base 8: mod_base = OTHER; note = 2'O-methyl uridine
  modified_base 9: mod_base = OTHER; note = 2'-fluoro guanosine
  modified_base 10: mod_base = OTHER; note = 2'O-methyl guanosine
  modified_base 11: mod_base = OTHER; note = 2'-fluoro adenosine
  modified_base 12: mod_base = OTHER; note = 2'O-methyl guanosine
  modified_base 13: mod_base = OTHER; note = 2'-fluoro cytidine
  modified_base 14: mod_base = OTHER; note = 2'O-methyl uridine
  modified_base 15: mod_base = OTHER; note = 2'-fluoro uridine
  modified_base 16: mod_base = OTHER; note = 2'O-methyl guanosine
  modified_base 17: mod_base = OTHER; note = 2'-fluoro uridine
  modified_base 18: mod_base = OTHER; note = 2'O-methyl cytidine
  modified_base 19: mod_base = OTHER; note = 2'-fluoro cytidine
  modified_base 20: mod_base = OTHER; note = 2'O-methyl uridine phosphorothioate
  modified_base 21: mod_base = OTHER; note = 2'-fluoro uridine
gcgcggctggagcttgtcctt

SEQ ID NO: 1144 - RNA, 21 nt, synthetic construct
  source 1..21: mol_type = other RNA
  modified_base 1: mod_base = OTHER; note = 2'-fluoro guanosine phosphorothioate
  modified_base 2: mod_base = OTHER; note = 2'O-methyl cytidine phosphorothioate
  modified_base 3: mod_base = OTHER; note = 2'-fluoro guanosine
  modified_base 4: mod_base = OTHER; note = 2'O-methyl guanosine
  modified_base 5: mod_base = OTHER; note = 2'-fluoro cytidine
  modified_base 6: mod_base = OTHER; note = 2'O-methyl uridine
  modified_base 7: mod_base = OTHER; note = 2'-fluoro guanosine
  modified_base 8: mod_base = OTHER; note = 2'O-methyl guanosine
  modified_base 9: mod_base = OTHER; note = 2'-fluoro adenosine
  modified_base 10: mod_base = OTHER; note = 2'O-methyl guanosine
  modified_base 11: mod_base = OTHER; note = 2'-fluoro cytidine
  modified_base 12: mod_base = OTHER; note = 2'O-methyl uridine
  modified_base 13: mod_base = OTHER; note = 2'-fluoro uridine
  modified_base 14: mod_base = OTHER; note = 2'O-methyl guanosine
  modified_base 15: mod_base = OTHER; note = 2'-fluoro uridine
  modified_base 16: mod_base = OTHER; note = 2'O-methyl cytidine
  modified_base 17: mod_base = OTHER; note = 2'-fluoro cytidine
  modified_base 18: mod_base = OTHER; note = 2'O-methyl uridine
  modified_base 19: mod_base = OTHER; note = 2'-fluoro uridine
  modified_base 20: mod_base = OTHER; note = 2'O-methyl cytidine phosphorothioate
  modified_base 21: mod_base = OTHER; note = 2'-fluoro guanosine
gcggctggagcttgtccttcg

SEQ ID NO: 1145 - RNA, 21 nt, synthetic construct
  source 1..21: mol_type = other RNA
  modified_base 1: mod_base = OTHER; note = 2'-fluoro guanosine phosphorothioate
  modified_base 2: mod_base = OTHER; note = 2'O-methyl cytidine phosphorothioate
  modified_base 3: mod_base = OTHER; note = 2'-fluoro uridine
  modified_base 4: mod_base = OTHER; note = 2'O-methyl guanosine
  modified_base 5: mod_base = OTHER; note = 2'-fluoro guanosine
  modified_base 6: mod_base = OTHER; note = 2'O-methyl adenosine
  modified_base 7: mod_base = OTHER; note = 2'-fluoro guanosine
  modified_base 8: mod_base = OTHER; note = 2'O-methyl cytidine
  modified_base 9: mod_base = OTHER; note = 2'-fluoro uridine
  modified_base 10: mod_base = OTHER; note = 2'O-methyl uridine
  modified_base 11: mod_base = OTHER; note = 2'-fluoro guanosine
  modified_base 12: mod_base = OTHER; note = 2'O-methyl uridine
  modified_base 13: mod_base = OTHER; note = 2'-fluoro cytidine
  modified_base 14: mod_base = OTHER; note = 2'O-methyl cytidine
  modified_base 15: mod_base = OTHER; note = 2'-fluoro uridine
  modified_base 16: mod_base = OTHER; note = 2'O-methyl uridine
  modified_base 17: mod_base = OTHER; note = 2'-fluoro cytidine
  modified_base 18: mod_base = OTHER; note = 2'O-methyl guanosine
  modified_base 19: mod_base = OTHER; note = 2'-fluoro cytidine
  modified_base 20: mod_base = OTHER; note = 2'O-methyl guanosine phosphorothioate
  modified_base 21: mod_base = OTHER; note = 2'-fluoro guanosine
gctggagcttgtccttcgcgg

SEQ ID NO: 1146 - RNA, 21 nt, synthetic construct
  source 1..21: mol_type = other RNA
  modified_base 1: mod_base = OTHER; note = 2'-fluoro uridine phosphorothioate
  modified_base 2: mod_base = OTHER; note = 2'O-methyl guanosine phosphorothioate
  modified_base 3: mod_base = OTHER; note = 2'-fluoro guanosine
  modified_base 4: mod_base = OTHER; note = 2'O-methyl adenosine
  modified_base 5: mod_base = OTHER; note = 2'-fluoro guanosine
  modified_base 6: mod_base = OTHER; note = 2'O-methyl cytidine
  modified_base 7: mod_base = OTHER; note = 2'-fluoro uridine
  modified_base 8: mod_base = OTHER; note = 2'O-methyl uridine
  modified_base 9: mod_base = OTHER; note = 2'-fluoro guanosine
  modified_base 10: mod_base = OTHER; note = 2'O-methyl uridine
  modified_base 11: mod_base = OTHER; note = 2'-fluoro cytidine
  modified_base 12: mod_base = OTHER; note = 2'O-methyl cytidine
  modified_base 13: mod_base = OTHER; note = 2'-fluoro uridine
  modified_base 14: mod_base = OTHER; note = 2'O-methyl uridine
  modified_base 15: mod_base = OTHER; note = 2'-fluoro cytidine
  modified_base 16: mod_base = OTHER; note = 2'O-methyl guanosine
  modified_base 17: mod_base = OTHER; note = 2'-fluoro cytidine
  modified_base 18: mod_base = OTHER; note = 2'O-methyl guanosine
  modified_base 19: mod_base = OTHER; note = 2'-fluoro guanosine
  modified_base 20: mod_base = OTHER; note = 2'O-methyl guanosine phosphorothioate
  modified_base 21: mod_base = OTHER; note = 2'-fluoro cytidine
tggagcttgtccttcgcgggc

SEQ ID NO: 1147 - RNA, 21 nt, synthetic construct
  source 1..21: mol_type = other RNA
  modified_base 1: mod_base = OTHER; note = 2'-fluoro guanosine phosphorothioate
  modified_base 2: mod_base = OTHER; note = 2'O-methyl guanosine phosphorothioate
  modified_base 3: mod_base = OTHER; note = 2'-fluoro adenosine
  modified_base 4: mod_base = OTHER; note = 2'O-methyl guanosine
  modified_base 5: mod_base = OTHER; note = 2'-fluoro cytidine
  modified_base 6: mod_base = OTHER; note = 2'O-methyl uridine
  modified_base 7: mod_base = OTHER; note = 2'-fluoro uridine
  modified_base 8: mod_base = OTHER; note = 2'O-methyl guanosine
  modified_base 9: mod_base = OTHER; note = 2'-fluoro uridine
  modified_base 10: mod_base = OTHER; note = 2'O-methyl cytidine
  modified_base 11: mod_base = OTHER; note = 2'-fluoro cytidine
  modified_base 12: mod_base = OTHER; note = 2'O-methyl uridine
  modified_base 13: mod_base = OTHER; note = 2'-fluoro uridine
  modified_base 14: mod_base = OTHER; note = 2'O-methyl cytidine
  modified_base 15: mod_base = OTHER; note = 2'-fluoro guanosine
  modified_base 16: mod_base = OTHER; note = 2'O-methyl cytidine
  modified_base 17: mod_base = OTHER; note = 2'-fluoro guanosine
  modified_base 18: mod_base = OTHER; note = 2'O-methyl guanosine
  modified_base 19: mod_base = OTHER; note = 2'-fluoro guanosine
  modified_base 20: mod_base = OTHER; note = 2'O-methyl cytidine phosphorothioate
  modified_base 21: mod_base = OTHER; note = 2'-fluoro uridine
ggagcttgtccttcgcgggct

SEQ ID NO: 1148 - RNA, 21 nt, synthetic construct
  source 1..21: mol_type = other RNA
  modified_base 1: mod_base = OTHER; note = 2'-fluoro guanosine phosphorothioate
  modified_base 2: mod_base = OTHER; note = 2'O-methyl adenosine phosphorothioate
  modified_base 3: mod_base = OTHER; note = 2'-fluoro guanosine
  modified_base 4: mod_base = OTHER; note = 2'O-methyl cytidine
  modified_base 5: mod_base = OTHER; note = 2'-fluoro uridine
  modified_base 6: mod_base = OTHER; note = 2'O-methyl uridine
  modified_base 7: mod_base = OTHER; note = 2'-fluoro guanosine
  modified_base 8: mod_base = OTHER; note = 2'O-methyl uridine
  modified_base 9: mod_base = OTHER; note = 2'-fluoro cytidine
  modified_base 10: mod_base = OTHER; note = 2'O-methyl cytidine
  modified_base 11: mod_base = OTHER; note = 2'-fluoro uridine
  modified_base 12: mod_base = OTHER; note = 2'O-methyl uridine
  modified_base 13: mod_base = OTHER; note = 2'-fluoro cytidine
  modified_base 14: mod_base = OTHER; note = 2'O-methyl guanosine
  modified_base 15: mod_base = OTHER; note = 2'-fluoro cytidine
  modified_base 16: mod_base = OTHER; note = 2'O-methyl guanosine
  modified_base 17: mod_base = OTHER; note = 2'-fluoro guanosine
  modified_base 18: mod_base = OTHER; note = 2'O-methyl guanosine
  modified_base 19: mod_base = OTHER; note = 2'-fluoro cytidine
  modified_base 20: mod_base = OTHER; note = 2'O-methyl uridine phosphorothioate
  modified_base 21: mod_base = OTHER; note = 2'-fluoro guanosine
gagcttgtccttcgcgggctg

SEQ ID NO: 1149 - RNA, 21 nt, synthetic construct
  source 1..21: mol_type = other RNA
  modified_base 1: mod_base = OTHER; note = 2'-fluoro adenosine phosphorothioate
  modified_base 2: mod_base = OTHER; note = 2'O-methyl guanosine phosphorothioate
  modified_base 3: mod_base = OTHER; note = 2'-fluoro cytidine
  modified_base 4: mod_base = OTHER; note = 2'O-methyl uridine
  modified_base 5: mod_base = OTHER; note = 2'-fluoro uridine
  modified_base 6: mod_base = OTHER; note = 2'O-methyl guanosine
  modified_base 7: mod_base = OTHER; note = 2'-fluoro uridine
  modified_base 8: mod_base = OTHER; note = 2'O-methyl cytidine
  modified_base 9: mod_base = OTHER; note = 2'-fluoro cytidine
  modified_base 10: mod_base = OTHER; note = 2'O-methyl uridine
  modified_base 11: mod_base = OTHER; note = 2'-fluoro uridine
  modified_base 12: mod_base = OTHER; note = 2'O-methyl cytidine
  modified_base 13: mod_base = OTHER; note = 2'-fluoro guanosine
  modified_base 14: mod_base = OTHER; note = 2'O-methyl cytidine
  modified_base 15: mod_base = OTHER; note = 2'-fluoro guanosine
  modified_base 16: mod_base = OTHER; note = 2'O-methyl guanosine
  modified_base 17: mod_base = OTHER; note = 2'-fluoro guanosine
  modified_base 18: mod_base = OTHER; note = 2'O-methyl cytidine
  modified_base 19: mod_base = OTHER; note = 2'-fluoro uridine
  modified_base 20: mod_base = OTHER; note = 2'O-methyl guanosine phosphorothioate
  modified_base 21: mod_base = OTHER; note = 2'-fluoro cytidine
agcttgtccttcgcgggctgc

SEQ ID NO: 1150 - RNA, 21 nt, synthetic construct
  source 1..21: mol_type = other RNA
  modified_base 1: mod_base = OTHER; note = 2'-fluoro uridine phosphorothioate
  modified_base 2: mod_base = OTHER; note = 2'O-methyl uridine phosphorothioate
  modified_base 3: mod_base = OTHER; note = 2'-fluoro guanosine
  modified_base 4: mod_base = OTHER; note = 2'O-methyl uridine
  modified_base 5: mod_base = OTHER; note = 2'-fluoro cytidine
  modified_base 6: mod_base = OTHER; note = 2'O-methyl cytidine
  modified_base 7: mod_base = OTHER; note = 2'-fluoro uridine
  modified_base 8: mod_base = OTHER; note = 2'O-methyl uridine
  modified_base 9: mod_base = OTHER; note = 2'-fluoro cytidine
  modified_base 10: mod_base = OTHER; note = 2'O-methyl guanosine
  modified_base 11: mod_base = OTHER; note = 2'-fluoro cytidine
  modified_base 12: mod_base = OTHER; note = 2'O-methyl guanosine
  modified_base 13: mod_base = OTHER; note = 2'-fluoro guanosine
  modified_base 14: mod_base = OTHER; note = 2'O-methyl guanosine
  modified_base 15: mod_base = OTHER; note = 2'-fluoro cytidine
  modified_base 16: mod_base = OTHER; note = 2'O-methyl uridine
  modified_base 17: mod_base = OTHER; note = 2'-fluoro guanosine
  modified_base 18: mod_base = OTHER; note = 2'O-methyl cytidine
  modified_base 19: mod_base = OTHER; note = 2'-fluoro guanosine
  modified_base 20: mod_base = OTHER; note = 2'O-methyl guanosine phosphorothioate
  modified_base 21: mod_base = OTHER; note = 2'-fluoro cytidine
ttgtccttcgcgggctgcggc

SEQ ID NO: 1151 - RNA, 21 nt, synthetic construct
  source 1..21: mol_type = other RNA
  modified_base 1: mod_base = OTHER; note = 2'-fluoro uridine phosphorothioate
  modified_base 2: mod_base = OTHER; note = 2'O-methyl guanosine phosphorothioate
  modified_base 3: mod_base = OTHER; note = 2'-fluoro uridine
  modified_base 4: mod_base = OTHER; note = 2'O-methyl cytidine
  modified_base 5: mod_base = OTHER; note = 2'-fluoro cytidine
  modified_base 6: mod_base = OTHER; note = 2'O-methyl uridine
  modified_base 7: mod_base = OTHER; note = 2'-fluoro uridine
  modified_base 8: mod_base = OTHER; note = 2'O-methyl cytidine
  modified_base 9: mod_base = OTHER; note = 2'-fluoro guanosine
  modified_base 10: mod_base = OTHER; note = 2'O-methyl cytidine
  modified_base 11: mod_base = OTHER; note = 2'-fluoro guanosine
  modified_base 12: mod_base = OTHER; note = 2'O-methyl guanosine
  modified_base 13: mod_base = OTHER; note = 2'-fluoro guanosine
  modified_base 14: mod_base = OTHER; note = 2'O-methyl cytidine
  modified_base 15: mod_base = OTHER; note = 2'-fluoro uridine
  modified_base 16: mod_base = OTHER; note = 2'O-methyl guanosine
  modified_base 17: mod_base = OTHER; note = 2'-fluoro cytidine
  modified_base 18: mod_base = OTHER; note = 2'O-methyl guanosine
  modified_base 19: mod_base = OTHER; note = 2'-fluoro guanosine
  modified_base 20: mod_base = OTHER; note = 2'O-methyl cytidine phosphorothioate
  modified_base 21: mod_base = OTHER; note = 2'-fluoro uridine
tgtccttcgcgggctgcggct

SEQ ID NO: 1152 - RNA, 21 nt, synthetic construct
  source 1..21: mol_type = other RNA
  modified_base 1: mod_base = OTHER; note = 2'-fluoro guanosine phosphorothioate
  modified_base 2: mod_base = OTHER; note = 2'O-methyl uridine phosphorothioate
  modified_base 3: mod_base = OTHER; note = 2'-fluoro cytidine
  modified_base 4: mod_base = OTHER; note = 2'O-methyl cytidine
  modified_base 5: mod_base = OTHER; note = 2'-fluoro uridine
  modified_base 6: mod_base = OTHER; note = 2'O-methyl uridine
  modified_base 7: mod_base = OTHER; note = 2'-fluoro cytidine
  modified_base 8: mod_base = OTHER; note = 2'O-methyl guanosine
  modified_base 9: mod_base = OTHER; note = 2'-fluoro cytidine
  modified_base 10: mod_base = OTHER; note = 2'O-methyl guanosine
  modified_base 11: mod_base = OTHER; note = 2'-fluoro guanosine
  modified_base 12: mod_base = OTHER; note = 2'O-methyl guanosine
  modified_base 13: mod_base = OTHER; note = 2'-fluoro cytidine
  modified_base 14: mod_base = OTHER; note = 2'O-methyl uridine
  modified_base 15: mod_base = OTHER; note = 2'-fluoro guanosine
  modified_base 16: mod_base = OTHER; note = 2'O-methyl cytidine
  modified_base 17: mod_base = OTHER; note = 2'-fluoro guanosine
  modified_base 18: mod_base = OTHER; note = 2'O-methyl guanosine
  modified_base 19: mod_base = OTHER; note = 2'-fluoro cytidine
  modified_base 20: mod_base = OTHER; note = 2'O-methyl uridine phosphorothioate
  modified_base 21: mod_base = OTHER; note = 2'-fluoro uridine
gtccttcgcgggctgcggctt

SEQ ID NO: 1153 - RNA, 21 nt, synthetic construct
  source 1..21: mol_type = other RNA
  modified_base 1: mod_base = OTHER; note = 2'-fluoro guanosine phosphorothioate
  modified_base 2: mod_base = OTHER; note = 2'O-methyl guanosine phosphorothioate
  modified_base 3: mod_base = OTHER; note = 2'-fluoro cytidine
  modified_base 4: mod_base = OTHER; note = 2'O-methyl uridine
  modified_base 5: mod_base = OTHER; note = 2'-fluoro guanosine
  modified_base 6: mod_base = OTHER; note = 2'O-methyl cytidine
  modified_base 7: mod_base = OTHER; note = 2'-fluoro guanosine
  modified_base 8: mod_base = OTHER; note = 2'O-methyl guanosine
  modified_base 9: mod_base = OTHER; note = 2'-fluoro cytidine
  modified_base 10: mod_base = OTHER; note = 2'O-methyl uridine
  modified_base 11: mod_base = OTHER; note = 2'-fluoro uridine
  modified_base 12: mod_base = OTHER; note = 2'O-methyl cytidine
  modified_base 13: mod_base = OTHER; note = 2'-fluoro cytidine
  modified_base 14: mod_base = OTHER; note = 2'O-methyl uridine
  modified_base 15: mod_base = OTHER; note = 2'-fluoro guanosine
  modified_base 16: mod_base = OTHER; note = 2'O-methyl guanosine
  modified_base 17: mod_base = OTHER; note = 2'-fluoro guanosine
  modified_base 18: mod_base = OTHER; note = 2'O-methyl cytidine
  modified_base 19: mod_base = OTHER; note = 2'-fluoro uridine
  modified_base 20: mod_base = OTHER; note = 2'O-methyl uridine phosphorothioate
  modified_base 21: mod_base = OTHER; note = 2'-fluoro cytidine
ggctgcggcttcctgggcttc

SEQ ID NO: 1154 - RNA, 21 nt, synthetic construct
  source 1..21: mol_type = other RNA
  modified_base 1: mod_base = OTHER; note = 2'-fluoro guanosine phosphorothioate
  modified_base 2: mod_base = OTHER; note = 2'O-methyl cytidine phosphorothioate
  modified_base 3: mod_base = OTHER; note = 2'-fluoro uridine
  modified_base 4: mod_base = OTHER; note = 2'O-methyl guanosine
  modified_base 5: mod_base = OTHER; note = 2'-fluoro cytidine
  modified_base 6: mod_base = OTHER; note = 2'O-methyl guanosine
  modified_base 7: mod_base = OTHER; note = 2'-fluoro guanosine
  modified_base 8: mod_base = OTHER; note = 2'O-methyl cytidine
  modified_base 9: mod_base = OTHER; note = 2'-fluoro uridine
  modified_base 10: mod_base = OTHER; note = 2'O-methyl uridine
  modified_base 11: mod_base = OTHER; note = 2'-fluoro cytidine
  modified_base 12: mod_base = OTHER; note = 2'O-methyl cytidine
  modified_base 13: mod_base = OTHER; note = 2'-fluoro uridine
  modified_base 14: mod_base = OTHER; note = 2'O-methyl guanosine
  modified_base 15: mod_base = OTHER; note = 2'-fluoro guanosine
  modified_base 16: mod_base = OTHER; note = 2'O-methyl guanosine
  modified_base 17: mod_base = OTHER; note = 2'-fluoro cytidine
  modified_base 18: mod_base = OTHER; note = 2'O-methyl uridine
  modified_base 19: mod_base = OTHER; note = 2'-fluoro uridine
  modified_base 20: mod_base = OTHER; note = 2'O-methyl cytidine phosphorothioate
  modified_base 21: mod_base = OTHER; note = 2'-fluoro uridine
gctgcggcttcctgggcttct

SEQ ID NO: 1155 - RNA, 21 nt, synthetic construct
  source 1..21: mol_type = other RNA
  modified_base 1: mod_base = OTHER; note = 2'-fluoro cytidine phosphorothioate
  modified_base 2: mod_base = OTHER; note = 2'O-methyl uridine phosphorothioate
  modified_base 3: mod_base = OTHER; note = 2'-fluoro guanosine
  modified_base 4: mod_base = OTHER; note = 2'O-methyl cytidine
  modified_base 5: mod_base = OTHER; note = 2'-fluoro guanosine
  modified_base 6: mod_base = OTHER; note = 2'O-methyl guanosine
  modified_base 7: mod_base = OTHER; note = 2'-fluoro cytidine
  modified_base 8: mod_base = OTHER; note = 2'O-methyl uridine
  modified_base 9: mod_base = OTHER; note = 2'-fluoro uridine
  modified_base 10: mod_base = OTHER; note = 2'O-methyl cytidine
  modified_base 11: mod_base = OTHER; note = 2'-fluoro cytidine
  modified_base 12: mod_base = OTHER; note = 2'O-methyl uridine
  modified_base 13: mod_base = OTHER; note = 2'-fluoro guanosine
  modified_base 14: mod_base = OTHER; note = 2'O-methyl guanosine
  modified_base 15: mod_base = OTHER; note = 2'-fluoro guanosine
  modified_base 16: mod_base = OTHER; note = 2'O-methyl cytidine
  modified_base 17: mod_base = OTHER; note = 2'-fluoro uridine
  modified_base 18: mod_base = OTHER; note = 2'O-methyl uridine
  modified_base 19: mod_base = OTHER; note = 2'-fluoro cytidine
  modified_base 20: mod_base = OTHER; note = 2'O-methyl uridine phosphorothioate
  modified_base 21: mod_base = OTHER; note = 2'-fluoro adenosine
ctgcggcttcctgggcttcta

SEQ ID NO: 1156 - RNA, 21 nt, synthetic construct
  source 1..21: mol_type = other RNA
  modified_base 1: mod_base = OTHER; note = 2'-fluoro uridine phosphorothioate
  modified_base 2: mod_base = OTHER; note = 2'O-methyl guanosine phosphorothioate
  modified_base 3: mod_base = OTHER; note = 2'-fluoro cytidine
  modified_base 4: mod_base = OTHER; note = 2'O-methyl guanosine
  modified_base 5: mod_base = OTHER; note = 2'-fluoro guanosine
  modified_base 6: mod_base = OTHER; note = 2'O-methyl cytidine
  modified_base 7: mod_base = OTHER; note = 2'-fluoro uridine
  modified_base 8: mod_base = OTHER; note = 2'O-methyl uridine
  modified_base 9: mod_base = OTHER; note = 2'-fluoro cytidine
  modified_base 10: mod_base = OTHER; note = 2'O-methyl cytidine
  modified_base 11: mod_base = OTHER; note = 2'-fluoro uridine
  modified_base 12: mod_base = OTHER; note = 2'O-methyl guanosine
  modified_base 13: mod_base = OTHER; note = 2'-fluoro guanosine
  modified_base 14: mod_base = OTHER; note = 2'O-methyl guanosine
  modified_base 15: mod_base = OTHER; note = 2'-fluoro cytidine
  modified_base 16: mod_base = OTHER; note = 2'O-methyl uridine
  modified_base 17: mod_base = OTHER; note = 2'-fluoro uridine
  modified_base 18: mod_base = OTHER; note = 2'O-methyl cytidine
  modified_base 19: mod_base = OTHER; note = 2'-fluoro uridine
  modified_base 20: mod_base = OTHER; note = 2'O-methyl adenosine phosphorothioate
  modified_base 21: mod_base = OTHER; note = 2'-fluoro cytidine
tgcggcttcctgggcttctac

SEQ ID NO: 1157 - RNA, 21 nt, synthetic construct
  source 1..21: mol_type = other RNA
  modified_base 1: mod_base = OTHER; note = 2'-fluoro guanosine phosphorothioate
  modified_base 2: mod_base = OTHER; note = 2'O-methyl cytidine phosphorothioate
  modified_base 3: mod_base = OTHER; note = 2'-fluoro guanosine
  modified_base 4: mod_base = OTHER; note = 2'O-methyl guanosine
  modified_base 5: mod_base = OTHER; note = 2'-fluoro cytidine
  modified_base 6: mod_base = OTHER; note = 2'O-methyl uridine
  modified_base 7: mod_base = OTHER; note = 2'-fluoro uridine
  modified_base 8: mod_base = OTHER; note = 2'O-methyl cytidine
  modified_base 9: mod_base = OTHER; note = 2'-fluoro cytidine
  modified_base 10: mod_base = OTHER; note = 2'O-methyl uridine
  modified_base 11: mod_base = OTHER; note = 2'-fluoro guanosine
  modified_base 12: mod_base = OTHER; note = 2'O-methyl guanosine
  modified_base 13: mod_base = OTHER; note = 2'-fluoro guanosine
  modified_base 14: mod_base = OTHER; note = 2'O-methyl cytidine
  modified_base 15: mod_base = OTHER; note = 2'-fluoro uridine
  modified_base 16: mod_base = OTHER; note = 2'O-methyl uridine
  modified_base 17: mod_base = OTHER; note = 2'-fluoro cytidine
  modified_base 18: mod_base = OTHER; note = 2'O-methyl uridine
  modified_base 19: mod_base = OTHER; note = 2'-fluoro adenosine
  modified_base 20: mod_base = OTHER; note = 2'O-methyl cytidine phosphorothioate
  modified_base 21: mod_base = OTHER; note = 2'-fluoro cytidine
gcggcttcctgggcttctacc

SEQ ID NO: 1158 - RNA, 21 nt, synthetic construct
  source 1..21: mol_type = other RNA
  modified_base 1: mod_base = OTHER; note = 2'-fluoro cytidine phosphorothioate
  modified_base 2: mod_base = OTHER; note = 2'O-methyl uridine phosphorothioate
  modified_base 3: mod_base = OTHER; note = 2'-fluoro uridine
  modified_base 4: mod_base = OTHER; note = 2'O-methyl cytidine
  modified_base 5: mod_base = OTHER; note = 2'-fluoro cytidine
  modified_base 6: mod_base = OTHER; note = 2'O-methyl uridine
  modified_base 7: mod_base = OTHER; note = 2'-fluoro guanosine
  modified_base 8: mod_base = OTHER; note = 2'O-methyl guanosine
  modified_base 9: mod_base = OTHER; note = 2'-fluoro guanosine
  modified_base 10: mod_base = OTHER; note = 2'O-methyl cytidine
  modified_base 11: mod_base = OTHER; note = 2'-fluoro uridine
  modified_base 12: mod_base = OTHER; note = 2'O-methyl uridine
  modified_base 13: mod_base = OTHER; note = 2'-fluoro cytidine
  modified_base 14: mod_base = OTHER; note = 2'O-methyl uridine
  modified_base 15: mod_base = OTHER; note = 2'-fluoro adenosine
  modified_base 16: mod_base = OTHER; note = 2'O-methyl cytidine
  modified_base 17: mod_base = OTHER; note = 2'-fluoro cytidine
  modified_base 18: mod_base = OTHER; note = 2'O-methyl adenosine
  modified_base 19: mod_base = OTHER; note = 2'-fluoro cytidine
  modified_base 20: mod_base = OTHER; note = 2'O-methyl guanosine phosphorothioate
  modified_base 21: mod_base = OTHER; note = 2'-fluoro uridine
cttcctgggcttctaccacgt

SEQ ID NO: 1159 - RNA, 21 nt, synthetic construct
  source 1..21: mol_type = other RNA
  modified_base 1: mod_base = OTHER; note = 2'-fluoro cytidine phosphorothioate
  modified_base 2: mod_base = OTHER; note = 2'O-methyl uridine phosphorothioate
  modified_base 3: mod_base = OTHER; note = 2'-fluoro guanosine
  modified_base 4: mod_base = OTHER; note = 2'O-methyl guanosine
  modified_base 5: mod_base = OTHER; note = 2'-fluoro guanosine
  modified_base 6: mod_base = OTHER; note = 2'O-methyl cytidine
  modified_base 7: mod_base = OTHER; note = 2'-fluoro uridine
  modified_base 8: mod_base = OTHER; note = 2'O-methyl uridine
  modified_base 9: mod_base = OTHER; note = 2'-fluoro cytidine
  modified_base 10: mod_base = OTHER; note = 2'O-methyl uridine
  modified_base 11: mod_base = OTHER; note = 2'-fluoro adenosine
  modified_base 12: mod_base = OTHER; note = 2'O-methyl cytidine
  modified_base 13: mod_base = OTHER; note = 2'-fluoro cytidine
  modified_base 14: mod_base = OTHER; note = 2'O-methyl adenosine
  modified_base 15: mod_base = OTHER; note = 2'-fluoro cytidine
  modified_base 16: mod_base = OTHER; note = 2'O-methyl guanosine
  modified_base 17: mod_base = OTHER; note = 2'-fluoro uridine
  modified_base 18: mod_base = OTHER; note = 2'O-methyl cytidine
  modified_base 19: mod_base = OTHER; note = 2'-fluoro guanosine
  modified_base 20: mod_base = OTHER; note = 2'O-methyl guanosine phosphorothioate
  modified_base 21: mod_base = OTHER; note = 2'-fluoro guanosine
ctgggcttctaccacgtcggg

SEQ ID NO: 1160 - RNA, 21 nt, synthetic construct
  source 1..21: mol_type = other RNA
  modified_base 1: mod_base = OTHER; note = 2'-fluoro uridine phosphorothioate
  modified_base 2: mod_base = OTHER; note = 2'O-methyl guanosine phosphorothioate
  modified_base 3: mod_base = OTHER; note = 2'-fluoro guanosine
  modified_base 4: mod_base = OTHER; note = 2'O-methyl guanosine
  modified_base 5: mod_base = OTHER; note = 2'-fluoro cytidine
  modified_base 6: mod_base = OTHER; note = 2'O-methyl uridine
  modified_base 7: mod_base = OTHER; note = 2'-fluoro uridine
  modified_base 8: mod_base = OTHER; note = 2'O-methyl cytidine
  modified_base 9: mod_base = OTHER; note = 2'-fluoro uridine
  modified_base 10: mod_base = OTHER; note = 2'O-methyl adenosine
  modified_base 11: mod_base = OTHER; note = 2'-fluoro cytidine
  modified_base 12: mod_base = OTHER; note = 2'O-methyl cytidine
  modified_base 13: mod_base = OTHER; note = 2'-fluoro adenosine
  modified_base 14: mod_base = OTHER; note = 2'O-methyl cytidine
  modified_base 15: mod_base = OTHER; note = 2'-fluoro guanosine
  modified_base 16: mod_base = OTHER; note = 2'O-methyl uridine
  modified_base 17: mod_base = OTHER; note = 2'-fluoro cytidine
  modified_base 18: mod_base = OTHER; note = 2'O-methyl guanosine
  modified_base 19: mod_base = OTHER; note = 2'-fluoro guanosine
  modified_base 20: mod_base = OTHER; note = 2'O-methyl guanosine phosphorothioate
  modified_base 21: mod_base = OTHER; note = 2'-fluoro guanosine
tgggcttctaccacgtcgggg

SEQ ID NO: 1161 - RNA, 21 nt, synthetic construct
  source 1..21: mol_type = other RNA
  modified_base 1: mod_base = OTHER; note = 2'-fluoro guanosine phosphorothioate
  modified_base 2: mod_base = OTHER; note = 2'O-methyl guanosine phosphorothioate
  modified_base 3: mod_base = OTHER; note = 2'-fluoro cytidine
  modified_base 4: mod_base = OTHER; note = 2'O-methyl uridine
  modified_base 5: mod_base = OTHER; note = 2'-fluoro uridine
  modified_base 6: mod_base = OTHER; note = 2'O-methyl cytidine
  modified_base 7: mod_base = OTHER; note = 2'-fluoro uridine
  modified_base 8: mod_base = OTHER; note = 2'O-methyl adenosine
  modified_base 9: mod_base = OTHER; note = 2'-fluoro cytidine
  modified_base 10: mod_base = OTHER; note = 2'O-methyl cytidine
  modified_base 11: mod_base = OTHER; note = 2'-fluoro adenosine
  modified_base 12: mod_base = OTHER; note = 2'O-methyl cytidine
  modified_base 13: mod_base = OTHER; note = 2'-fluoro guanosine
  modified_base 14: mod_base = OTHER; note = 2'O-methyl uridine
  modified_base 15: mod_base = OTHER; note = 2'-fluoro cytidine
  modified_base 16: mod_base = OTHER; note = 2'O-methyl guanosine
  modified_base 17: mod_base = OTHER; note = 2'-fluoro guanosine
  modified_base 18: mod_base = OTHER; note = 2'O-methyl guanosine
  modified_base 19: mod_base = OTHER; note = 2'-fluoro guanosine
  modified_base 20: mod_base = OTHER; note = 2'O-methyl cytidine phosphorothioate
  modified_base 21: mod_base = OTHER; note = 2'-fluoro guanosine
ggcttctaccacgtcggggcg

SEQ ID NO: 1162 - RNA, 21 nt, synthetic construct
  source 1..21: mol_type = other RNA
  modified_base 1: mod_base = OTHER; note = 2'-fluoro guanosine phosphorothioate
  modified_base 2: mod_base = OTHER; note = 2'O-methyl cytidine phosphorothioate
  modified_base 3: mod_base = OTHER; note = 2'-fluoro uridine
  modified_base 4: mod_base = OTHER; note = 2'O-methyl uridine
  modified_base 5: mod_base = OTHER; note = 2'-fluoro cytidine
  modified_base 6: mod_base = OTHER; note = 2'O-methyl uridine
  modified_base 7: mod_base = OTHER; note = 2'-fluoro adenosine
  modified_base 8: mod_base = OTHER; note = 2'O-methyl cytidine
  modified_base 9: mod_base = OTHER; note = 2'-fluoro cytidine
  modified_base 10: mod_base = OTHER; note = 2'O-methyl adenosine
  modified_base 11: mod_base = OTHER; note = 2'-fluoro cytidine
  modified_base 12: mod_base = OTHER; note = 2'O-methyl guanosine
  modified_base 13: mod_base = OTHER; note = 2'-fluoro uridine
  modified_base 14: mod_base = OTHER; note = 2'O-methyl cytidine
  modified_base 15: mod_base = OTHER; note = 2'-fluoro guanosine
  modified_base 16: mod_base = OTHER; note = 2'O-methyl guanosine
  modified_base 17: mod_base = OTHER; note = 2'-fluoro guanosine
  modified_base 18: mod_base = OTHER; note = 2'O-methyl guanosine
  modified_base 19: mod_base = OTHER; note = 2'-fluoro cytidine
  modified_base 20: mod_base = OTHER; note = 2'O-methyl guanosine phosphorothioate
  modified_base 21: mod_base = OTHER; note = 2'-fluoro adenosine
gcttctaccacgtcggggcga

SEQ ID NO: 1163 - RNA, 21 nt, synthetic construct
  source 1..21: mol_type = other RNA
  modified_base 1: mod_base = OTHER; note = 2'-fluoro cytidine phosphorothioate
  modified_base 2: mod_base = OTHER; note = 2'O-methyl uridine phosphorothioate
  modified_base 3: mod_base = OTHER; note = 2'-fluoro uridine
  modified_base 4: mod_base = OTHER; note = 2'O-methyl cytidine
  modified_base 5: mod_base = OTHER; note = 2'-fluoro uridine
  modified_base 6: mod_base = OTHER; note = 2'O-methyl adenosine
  modified_base 7: mod_base = OTHER; note = 2'-fluoro cytidine
  modified_base 8: mod_base = OTHER; note = 2'O-methyl cytidine
  modified_base 9: mod_base = OTHER; note = 2'-fluoro adenosine
  modified_base 10: mod_base = OTHER; note = 2'O-methyl cytidine
  modified_base 11: mod_base = OTHER; note = 2'-fluoro guanosine
  modified_base 12: mod_base = OTHER; note = 2'O-methyl uridine
  modified_base 13: mod_base = OTHER; note = 2'-fluoro cytidine
  modified_base 14: mod_base = OTHER; note = 2'O-methyl guanosine
  modified_base 15: mod_base = OTHER; note = 2'-fluoro guanosine
  modified_base 16: mod_base = OTHER; note = 2'O-methyl guanosine
  modified_base 17: mod_base = OTHER; note = 2'-fluoro guanosine
  modified_base 18: mod_base = OTHER; note = 2'O-methyl cytidine
  modified_base 19: mod_base = OTHER; note = 2'-fluoro guanosine
  modified_base 20: mod_base = OTHER; note = 2'O-methyl adenosine phosphorothioate
  modified_base 21: mod_base = OTHER; note = 2'-fluoro cytidine
cttctaccacgtcggggcgac

SEQ ID NO: 1164 - RNA, 21 nt, synthetic construct
  source 1..21: mol_type = other RNA
  modified_base 1: mod_base = OTHER; note = 2'-fluoro uridine phosphorothioate
  modified_base 2: mod_base = OTHER; note = 2'O-methyl uridine phosphorothioate
  modified_base 3: mod_base = OTHER; note = 2'-fluoro cytidine
  modified_base 4: mod_base = OTHER; note = 2'O-methyl uridine
  modified_base 5: mod_base = OTHER; note = 2'-fluoro adenosine
  modified_base 6: mod_base = OTHER; note = 2'O-methyl cytidine
  modified_base 7: mod_base = OTHER; note = 2'-fluoro cytidine
  modified_base 8: mod_base = OTHER; note = 2'O-methyl adenosine
  modified_base 9: mod_base = OTHER; note = 2'-fluoro cytidine
  modified_base 10: mod_base = OTHER; note = 2'O-methyl guanosine
  modified_base 11: mod_base = OTHER; note = 2'-fluoro uridine
  modified_base 12: mod_base = OTHER; note = 2'O-methyl cytidine
  modified_base 13: mod_base = OTHER; note = 2'-fluoro guanosine
  modified_base 14: mod_base = OTHER; note = 2'O-methyl guanosine
  modified_base 15: mod_base = OTHER; note = 2'-fluoro guanosine
  modified_base 16: mod_base = OTHER; note = 2'O-methyl guanosine
  modified_base 17: mod_base = OTHER; note = 2'-fluoro cytidine
  modified_base 18: mod_base = OTHER; note = 2'O-methyl guanosine
  modified_base 19: mod_base = OTHER; note = 2'-fluoro adenosine
  modified_base 20: mod_base = OTHER; note = 2'O-methyl cytidine phosphorothioate
  modified_base 21: mod_base = OTHER; note = 2'-fluoro cytidine
ttctaccacgtcggggcgacc

SEQ ID NO: 1165 - RNA, 21 nt, synthetic construct
  source 1..21: mol_type = other RNA
  modified_base 1: mod_base = OTHER; note = 2'-fluoro cytidine phosphorothioate
  modified_base 2: mod_base = OTHER; note = 2'O-methyl uridine phosphorothioate
  modified_base 3: mod_base = OTHER; note = 2'-fluoro adenosine
  modified_base 4: mod_base = OTHER; note = 2'O-methyl cytidine
  modified_base 5: mod_base = OTHER; note = 2'-fluoro cytidine
  modified_base 6: mod_base = OTHER; note = 2'O-methyl adenosine
  modified_base 7: mod_base = OTHER; note = 2'-fluoro cytidine
  modified_base 8: mod_base = OTHER; note = 2'O-methyl guanosine
  modified_base 9: mod_base = OTHER; note = 2'-fluoro uridine
  modified_base 10: mod_base = OTHER; note = 2'O-methyl cytidine
  modified_base 11: mod_base = OTHER; note = 2'-fluoro guanosine
  modified_base 12: mod_base = OTHER; note = 2'O-methyl guanosine
  modified_base 13: mod_base = OTHER; note = 2'-fluoro guanosine
  modified_base 14: mod_base = OTHER; note = 2'O-methyl guanosine
  modified_base 15: mod_base = OTHER; note = 2'-fluoro cytidine
  modified_base 16: mod_base = OTHER; note = 2'O-methyl guanosine
  modified_base 17: mod_base = OTHER; note = 2'-fluoro adenosine
  modified_base 18: mod_base = OTHER; note = 2'O-methyl cytidine
  modified_base 19: mod_base = OTHER; note = 2'-fluoro cytidine
  modified_base 20: mod_base = OTHER; note = 2'O-methyl cytidine phosphorothioate
  modified_base 21: mod_base = OTHER; note = 2'-fluoro guanosine
ctaccacgtcggggcgacccg

SEQ ID NO: 1166 - RNA, 21 nt, synthetic construct
  source 1..21: mol_type = other RNA
  modified_base 1: mod_base = OTHER; note = 2'-fluoro uridine phosphorothioate
  modified_base 2: mod_base = OTHER; note = 2'O-methyl guanosine phosphorothioate
  modified_base 3: mod_base = OTHER; note = 2'-fluoro cytidine
  modified_base 4: mod_base = OTHER; note = 2'O-methyl cytidine
  modified_base 5: mod_base = OTHER; note = 2'-fluoro uridine
  modified_base 6: mod_base = OTHER; note = 2'O-methyl guanosine
  modified_base 7: mod_base = OTHER; note = 2'-fluoro adenosine
  modified_base 8: mod_base = OTHER; note = 2'O-methyl guanosine
  modified_base 9: mod_base = OTHER; note = 2'-fluoro cytidine
  modified_base 10: mod_base = OTHER; note = 2'O-methyl guanosine
  modified_base 11: mod_base = OTHER; note = 2'-fluoro adenosine
  modified_base 12: mod_base = OTHER; note = 2'O-methyl guanosine
  modified_base 13: mod_base = OTHER; note = 2'-fluoro cytidine
  modified_base 14: mod_base = OTHER; note = 2'O-methyl adenosine
  modified_base 15: mod_base = OTHER; note = 2'-fluoro cytidine
  modified_base 16: mod_base = OTHER; note = 2'O-methyl guanosine
  modified_base 17: mod_base = OTHER; note = 2'-fluoro cytidine
  modified_base 18: mod_base = OTHER; note = 2'O-methyl cytidine
  modified_base 19: mod_base = OTHER; note = 2'-fluoro cytidine
  modified_base 20: mod_base = OTHER; note = 2'O-methyl cytidine phosphorothioate
  modified_base 21: mod_base = OTHER; note = 2'-fluoro guanosine
tgcctgagcgagcacgccccg

SEQ ID NO: 1167 - RNA, 21 nt, synthetic construct
  source 1..21: mol_type = other RNA
  modified_base 1: mod_base = OTHER; note = 2'-fluoro guanosine phosphorothioate
  modified_base 2: mod_base = OTHER; note = 2'O-methyl cytidine phosphorothioate
  modified_base 3: mod_base = OTHER; note = 2'-fluoro cytidine
  modified_base 4: mod_base = OTHER; note = 2'O-methyl uridine
  modified_base 5: mod_base = OTHER; note = 2'-fluoro guanosine
  modified_base 6: mod_base = OTHER; note = 2'O-methyl adenosine
  modified_base 7: mod_base = OTHER; note = 2'-fluoro guanosine
  modified_base 8: mod_base = OTHER; note = 2'O-methyl cytidine
  modified_base 9: mod_base = OTHER; note = 2'-fluoro guanosine
  modified_base 10: mod_base = OTHER; note = 2'O-methyl adenosine
  modified_base 11: mod_base = OTHER; note = 2'-fluoro guanosine
  modified_base 12: mod_base = OTHER; note = 2'O-methyl cytidine
  modified_base 13: mod_base = OTHER; note = 2'-fluoro adenosine
  modified_base 14: mod_base = OTHER; note = 2'O-methyl cytidine
  modified_base 15: mod_base = OTHER; note = 2'-fluoro guanosine
  modified_base 16: mod_base = OTHER; note = 2'O-methyl cytidine
  modified_base 17: mod_base = OTHER; note = 2'-fluoro cytidine
  modified_base 18: mod_base = OTHER; note = 2'O-methyl cytidine
  modified_base 19: mod_base = OTHER; note = 2'-fluoro cytidine
  modified_base 20: mod_base = OTHER; note = 2'O-methyl guanosine phosphorothioate
  modified_base 21: mod_base = OTHER; note = 2'-fluoro cytidine
gcctgagcgagcacgccccgc

SEQ ID NO: 1168 - RNA, 21 nt, synthetic construct
  source 1..21: mol_type = other RNA
  modified_base 1: mod_base = OTHER; note = 2'-fluoro uridine phosphorothioate
  modified_base 2: mod_base = OTHER; note = 2'O-methyl guanosine phosphorothioate
  modified_base 3: mod_base = OTHER; note = 2'-fluoro adenosine
  modified_base 4: mod_base = OTHER; note = 2'O-methyl guanosine
  modified_base 5: mod_base = OTHER; note = 2'-fluoro cytidine
  modified_base 6: mod_base = OTHER; note = 2'O-methyl guanosine
  modified_base 7: mod_base = OTHER; note = 2'-fluoro adenosine
  modified_base 8: mod_base = OTHER; note = 2'O-methyl guanosine
  modified_base 9: mod_base = OTHER; note = 2'-fluoro cytidine
  modified_base 10: mod_base = OTHER; note = 2'O-methyl adenosine
  modified_base 11: mod_base = OTHER; note = 2'-fluoro cytidine
  modified_base 12: mod_base = OTHER; note = 2'O-methyl guanosine
  modified_base 13: mod_base = OTHER; note = 2'-fluoro cytidine
  modified_base 14: mod_base = OTHER; note = 2'O-methyl cytidine
  modified_base 15: mod_base = OTHER; note = 2'-fluoro cytidine
  modified_base 16: mod_base = OTHER; note = 2'O-methyl cytidine
  modified_base 17: mod_base = OTHER; note = 2'-fluoro guanosine
  modified_base 18: mod_base = OTHER; note = 2'O-methyl cytidine
  modified_base 19: mod_base = OTHER; note = 2'-fluoro adenosine
  modified_base 20: mod_base = OTHER; note = 2'O-methyl cytidine phosphorothioate
  modified_base 21: mod_base = OTHER; note = 2'-fluoro cytidine
tgagcgagcacgccccgcacc

SEQ ID NO: 1169 - RNA, 21 nt, synthetic construct
  source 1..21: mol_type = other RNA
  modified_base 1: mod_base = OTHER; note = 2'-fluoro adenosine phosphorothioate
  modified_base 2: mod_base = OTHER; note = 2'O-methyl guanosine phosphorothioate
  modified_base 3: mod_base = OTHER; note = 2'-fluoro cytidine
  modified_base 4: mod_base = OTHER; note = 2'O-methyl guanosine
  modified_base 5: mod_base = OTHER; note = 2'-fluoro adenosine
  modified_base 6: mod_base = OTHER; note = 2'O-methyl guanosine
  modified_base 7: mod_base = OTHER; note = 2'-fluoro cytidine
  modified_base 8: mod_base = OTHER; note = 2'O-methyl adenosine
  modified_base 9: mod_base = OTHER; note = 2'-fluoro cytidine
  modified_base 10: mod_base = OTHER; note = 2'O-methyl guanosine
  modified_base 11: mod_base = OTHER; note = 2'-fluoro cytidine
  modified_base 12: mod_base = OTHER; note = 2'O-methyl cytidine
  modified_base 13: mod_base = OTHER; note = 2'-fluoro cytidine
  modified_base 14: mod_base = OTHER; note = 2'O-methyl cytidine
  modified_base 15: mod_base = OTHER; note = 2'-fluoro guanosine
  modified_base 16: mod_base = OTHER; note = 2'O-methyl cytidine
  modified_base 17: mod_base = OTHER; note = 2'-fluoro adenosine
  modified_base 18: mod_base = OTHER; note = 2'O-methyl cytidine
  modified_base 19: mod_base = OTHER; note = 2'-fluoro cytidine
  modified_base 20: mod_base = OTHER; note = 2'O-methyl uridine phosphorothioate
  modified_base 21: mod_base = OTHER; note = 2'-fluoro cytidine
agcgagcacgccccgcacctc

SEQ ID NO: 1170 - RNA, 21 nt, synthetic construct
  source 1..21: mol_type = other RNA
  modified_base 1: mod_base = OTHER; note = 2'-fluoro guanosine phosphorothioate
  modified_base 2: mod_base = OTHER; note = 2'O-methyl cytidine phosphorothioate
  modified_base 3: mod_base = OTHER; note = 2'-fluoro guanosine
  modified_base 4: mod_base = OTHER; note = 2'O-methyl adenosine
  modified_base 5: mod_base = OTHER; note = 2'-fluoro guanosine
  modified_base 6: mod_base = OTHER; note = 2'O-methyl cytidine
  modified_base 7: mod_base = OTHER; note = 2'-fluoro adenosine
  modified_base 8: mod_base = OTHER; note = 2'O-methyl cytidine
  modified_base 9: mod_base = OTHER; note = 2'-fluoro guanosine
  modified_base 10: mod_base = OTHER; note = 2'O-methyl cytidine
  modified_base 11: mod_base = OTHER; note = 2'-fluoro cytidine
  modified_base 12: mod_base = OTHER; note = 2'O-methyl cytidine
  modified_base 13: mod_base = OTHER; note = 2'-fluoro cytidine
  modified_base 14: mod_base = OTHER; note = 2'O-methyl guanosine
  modified_base 15: mod_base = OTHER; note = 2'-fluoro cytidine
  modified_base 16: mod_base = OTHER; note = 2'O-methyl adenosine
  modified_base 17: mod_base = OTHER; note = 2'-fluoro cytidine
  modified_base 18: mod_base = OTHER; note = 2'O-methyl cytidine
  modified_base 19: mod_base = OTHER; note = 2'-fluoro uridine
  modified_base 20: mod_base = OTHER; note = 2'O-methyl cytidine phosphorothioate
  modified_base 21: mod_base = OTHER; note = 2'-fluoro cytidine
gcgagcacgccccgcacctcc

SEQ ID NO: 1171 - RNA, 21 nt, synthetic construct
  source 1..21: mol_type = other RNA
  modified_base 1: mod_base = OTHER; note = 2'-fluoro guanosine phosphorothioate
  modified_base 2: mod_base = OTHER; note = 2'O-methyl adenosine phosphorothioate
  modified_base 3: mod_base = OTHER; note = 2'-fluoro guanosine
  modified_base 4: mod_base = OTHER; note = 2'O-methyl cytidine
  modified_base 5: mod_base = OTHER; note = 2'-fluoro adenosine
  modified_base 6: mod_base = OTHER; note = 2'O-methyl cytidine
  modified_base 7: mod_base = OTHER; note = 2'-fluoro guanosine
  modified_base 8: mod_base = OTHER; note = 2'O-methyl cytidine
  modified_base 9: mod_base = OTHER; note = 2'-fluoro cytidine
  modified_base 10: mod_base = OTHER; note = 2'O-methyl cytidine
  modified_base 11: mod_base = OTHER; note = 2'-fluoro cytidine
  modified_base 12: mod_base = OTHER; note = 2'O-methyl guanosine
  modified_base 13: mod_base = OTHER; note = 2'-fluoro cytidine
  modified_base 14: mod_base = OTHER; note = 2'O-methyl adenosine
  modified_base 15: mod_base = OTHER; note = 2'-fluoro cytidine
  modified_base 16: mod_base = OTHER; note = 2'O-methyl cytidine
  modified_base 17: mod_base = OTHER; note = 2'-fluoro uridine
  modified_base 18: mod_base = OTHER; note = 2'O-methyl cytidine
  modified_base 19: mod_base = OTHER; note = 2'-fluoro cytidine
  modified_base 20: mod_base = OTHER; note = 2'O-methyl uridine phosphorothioate
  modified_base 21: mod_base = OTHER; note = 2'-fluoro cytidine
gagcacgccccgcacctcctc

SEQ ID NO: 1172 - RNA, 21 nt, synthetic construct
  source 1..21: mol_type = other RNA
  modified_base 1: mod_base = OTHER; note = 2'-fluoro cytidine phosphorothioate
  modified_base 2: mod_base = OTHER; note = 2'O-methyl guanosine phosphorothioate
  modified_base 3: mod_base = OTHER; note = 2'-fluoro cytidine
  modified_base 4: mod_base = OTHER; note = 2'O-methyl cytidine
  modified_base 5: mod_base = OTHER; note = 2'-fluoro cytidine
  modified_base 6: mod_base = OTHER; note = 2'O-methyl cytidine
  modified_base 7: mod_base = OTHER; note = 2'-fluoro guanosine
  modified_base 8: mod_base = OTHER; note = 2'O-methyl cytidine
  modified_base 9: mod_base = OTHER; note = 2'-fluoro adenosine
  modified_base 10: mod_base = OTHER; note = 2'O-methyl cytidine
  modified_base 11: mod_base = OTHER; note = 2'-fluoro cytidine
  modified_base 12: mod_base = OTHER; note = 2'O-methyl uridine
  modified_base 13: mod_base = OTHER; note = 2'-fluoro cytidine
  modified_base 14: mod_base = OTHER; note = 2'O-methyl cytidine
  modified_base 15: mod_base = OTHER; note = 2'-fluoro uridine
  modified_base 16: mod_base = OTHER; note = 2'O-methyl cytidine
  modified_base 17: mod_base = OTHER; note = 2'-fluoro cytidine
  modified_base 18: mod_base = OTHER; note = 2'O-methyl guanosine
  modified_base 19: mod_base = OTHER; note = 2'-fluoro cytidine
  modified_base 20: mod_base = OTHER; note = 2'O-methyl guanosine phosphorothioate
  modified_base 21: mod_base = OTHER; note = 2'-fluoro adenosine
cgccccgcacctcctccgcga

SEQ ID NO: 1173 - RNA, 21 nt, synthetic construct
  source 1..21: mol_type = other RNA
  modified_base 1: mod_base = OTHER; note = 2'-fluoro guanosine phosphorothioate
  modified_base 2: mod_base = OTHER; note = 2'O-methyl cytidine phosphorothioate
  modified_base 3: mod_base = OTHER; note = 2'-fluoro cytidine
  modified_base 4: mod_base = OTHER; note = 2'O-methyl cytidine
  modified_base 5: mod_base = OTHER; note = 2'-fluoro cytidine
  modified_base 6: mod_base = OTHER; note = 2'O-methyl guanosine
  modified_base 7: mod_base = OTHER; note = 2'-fluoro cytidine
  modified_base 8: mod_base = OTHER; note = 2'O-methyl adenosine
  modified_base 9: mod_base = OTHER; note = 2'-fluoro cytidine
  modified_base 10: mod_base = OTHER; note = 2'O-methyl cytidine
  modified_base 11: mod_base = OTHER; note = 2'-fluoro uridine
  modified_base 12: mod_base = OTHER; note = 2'O-methyl cytidine
  modified_base 13: mod_base = OTHER; note = 2'-fluoro cytidine
  modified_base 14: mod_base = OTHER; note = 2'O-methyl uridine
  modified_base 15: mod_base = OTHER; note = 2'-fluoro cytidine
  modified_base 16: mod_base = OTHER; note = 2'O-methyl cytidine
  modified_base 17: mod_base = OTHER; note = 2'-fluoro guanosine
  modified_base 18: mod_base = OTHER; note = 2'O-methyl cytidine
  modified_base 19: mod_base = OTHER; note = 2'-fluoro guanosine
  modified_base 20: mod_base = OTHER; note = 2'O-methyl adenosine phosphorothioate
  modified_base 21: mod_base = OTHER; note = 2'-fluoro cytidine
gccccgcacctcctccgcgac

SEQ ID NO: 1174 - RNA, 21 nt, synthetic construct
  source 1..21: mol_type = other RNA
  modified_base 1: mod_base = OTHER; note = 2'-fluoro cytidine phosphorothioate
  modified_base 2: mod_base = OTHER; note = 2'O-methyl cytidine phosphorothioate
  modified_base 3: mod_base = OTHER; note = 2'-fluoro cytidine
  modified_base 4: mod_base = OTHER; note = 2'O-methyl cytidine
  modified_base 5: mod_base = OTHER; note = 2'-fluoro guanosine
  modified_base 6: mod_base = OTHER; note = 2'O-methyl cytidine
  modified_base 7: mod_base = OTHER; note = 2'-fluoro adenosine
  modified_base 8: mod_base = OTHER; note = 2'O-methyl cytidine
  modified_base 9: mod_base = OTHER; note = 2'-fluoro cytidine
  modified_base 10: mod_base = OTHER; note = 2'O-methyl uridine
  modified_base 11: mod_base = OTHER; note = 2'-fluoro cytidine
  modified_base 12: mod_base = OTHER; note = 2'O-methyl cytidine
  modified_base 13: mod_base = OTHER; note = 2'-fluoro uridine
  modified_base 14: mod_base = OTHER; note = 2'O-methyl cytidine
  modified_base 15: mod_base = OTHER; note = 2'-fluoro cytidine
  modified_base 16: mod_base = OTHER; note = 2'O-methyl guanosine
  modified_base 17: mod_base = OTHER; note = 2'-fluoro cytidine
  modified_base 18: mod_base = OTHER; note = 2'O-methyl guanosine
  modified_base 19: mod_base = OTHER; note = 2'-fluoro adenosine
  modified_base 20: mod_base = OTHER; note = 2'O-methyl cytidine phosphorothioate
  modified_base 21: mod_base = OTHER; note = 2'-fluoro guanosine
ccccgcacctcctccgcgacg

SEQ ID NO: 1175 - RNA, 21 nt, synthetic construct
  source 1..21: mol_type = other RNA
  modified_base 1: mod_base = OTHER; note = 2'-fluoro cytidine phosphorothioate
  modified_base 2: mod_base = OTHER; note = 2'O-methyl cytidine phosphorothioate
  modified_base 3: mod_base = OTHER; note = 2'-fluoro cytidine
  modified_base 4: mod_base = OTHER; note = 2'O-methyl guanosine
  modified_base 5: mod_base = OTHER; note = 2'-fluoro cytidine
  modified_base 6: mod_base = OTHER; note = 2'O-methyl adenosine
  modified_base 7: mod_base = OTHER; note = 2'-fluoro cytidine
  modified_base 8: mod_base = OTHER; note = 2'O-methyl cytidine
  modified_base 9: mod_base = OTHER; note = 2'-fluoro uridine
  modified_base 10: mod_base = OTHER; note = 2'O-methyl cytidine
  modified_base 11: mod_base = OTHER; note = 2'-fluoro cytidine
  modified_base 12: mod_base = OTHER; note = 2'O-methyl uridine
  modified_base 13: mod_base = OTHER; note = 2'-fluoro cytidine
  modified_base 14: mod_base = OTHER; note = 2'O-methyl cytidine
  modified_base 15: mod_base = OTHER; note = 2'-fluoro guanosine
  modified_base 16: mod_base = OTHER; note = 2'O-methyl cytidine
  modified_base 17: mod_base = OTHER; note = 2'-fluoro guanosine
  modified_base 18: mod_base = OTHER; note = 2'O-methyl adenosine
  modified_base 19: mod_base = OTHER; note = 2'-fluoro cytidine
  modified_base 20: mod_base = OTHER; note = 2'O-methyl guanosine phosphorothioate
  modified_base 21: mod_base = OTHER; note = 2'-fluoro cytidine
cccgcacctcctccgcgacgc

SEQ ID NO: 1176 - RNA, 21 nt, synthetic construct
  source 1..21: mol_type = other RNA
  modified_base 1: mod_base = OTHER; note = 2'-fluoro cytidine phosphorothioate
  modified_base 2: mod_base = OTHER; note = 2'O-methyl cytidine phosphorothioate
  modified_base 3: mod_base = OTHER; note = 2'-fluoro guanosine
  modified_base 4: mod_base = OTHER; note = 2'O-methyl cytidine
  modified_base 5: mod_base = OTHER; note = 2'-fluoro adenosine
  modified_base 6: mod_base = OTHER; note = 2'O-methyl cytidine
  modified_base 7: mod_base = OTHER; note = 2'-fluoro cytidine
  modified_base 8: mod_base = OTHER; note = 2'O-methyl uridine
  modified_base 9: mod_base = OTHER; note = 2'-fluoro cytidine
  modified_base 10: mod_base = OTHER; note = 2'O-methyl cytidine
  modified_base 11: mod_base = OTHER; note = 2'-fluoro uridine
  modified_base 12: mod_base = OTHER; note = 2'O-methyl cytidine
  modified_base 13: mod_base = OTHER; note = 2'-fluoro cytidine
  modified_base 14: mod_base = OTHER; note = 2'O-methyl guanosine
  modified_base 15: mod_base = OTHER; note = 2'-fluoro cytidine
  modified_base 16: mod_base = OTHER; note = 2'O-methyl guanosine
  modified_base 17: mod_base = OTHER; note = 2'-fluoro adenosine
  modified_base 18: mod_base = OTHER; note = 2'O-methyl cytidine
  modified_base 19: mod_base = OTHER; note = 2'-fluoro guanosine
  modified_base 20: mod_base = OTHER; note = 2'O-methyl cytidine phosphorothioate
  modified_base 21: mod_base = OTHER; note = 2'-fluoro guanosine
ccgcacctcctccgcgacgcg

SEQ ID NO: 1177 - RNA, 21 nt, synthetic construct
  source 1..21: mol_type = other RNA
  modified_base 1: mod_base = OTHER; note = 2'-fluoro cytidine phosphorothioate
  modified_base 2: mod_base = OTHER; note = 2'O-methyl guanosine phosphorothioate
  modified_base 3: mod_base = OTHER; note = 2'-fluoro cytidine
  modified_base 4: mod_base = OTHER; note = 2'O-methyl adenosine
  modified_base 5: mod_base = OTHER; note = 2'-fluoro cytidine
  modified_base 6: mod_base = OTHER; note = 2'O-methyl cytidine
  modified_base 7: mod_base = OTHER; note = 2'-fluoro uridine
  modified_base 8: mod_base = OTHER; note = 2'O-methyl cytidine
  modified_base 9: mod_base = OTHER; note = 2'-fluoro cytidine
  modified_base 10: mod_base = OTHER; note = 2'O-methyl uridine
  modified_base 11: mod_base = OTHER; note = 2'-fluoro cytidine
  modified_base 12: mod_base = OTHER; note = 2'O-methyl cytidine
  modified_base 13: mod_base = OTHER; note = 2'-fluoro guanosine
  modified_base 14: mod_base = OTHER; note = 2'O-methyl cytidine
  modified_base 15: mod_base = OTHER; note = 2'-fluoro guanosine
  modified_base 16: mod_base = OTHER; note = 2'O-methyl adenosine
  modified_base 17: mod_base = OTHER; note = 2'-fluoro cytidine
  modified_base 18: mod_base = OTHER; note = 2'O-methyl guanosine
  modified_base 19: mod_base = OTHER; note = 2'-fluoro cytidine
  modified_base 20: mod_base = OTHER; note = 2'O-methyl guanosine phosphorothioate
  modified_base 21: mod_base = OTHER; note = 2'-fluoro cytidine
cgcacctcctccgcgacgcgc

SEQ ID NO: 1178 - RNA, 21 nt, synthetic construct
  source 1..21: mol_type = other RNA
  modified_base 1: mod_base = OTHER; note = 2'-fluoro cytidine phosphorothioate
  modified_base 2: mod_base = OTHER; note = 2'O-methyl adenosine phosphorothioate
  modified_base 3: mod_base = OTHER; note = 2'-fluoro cytidine
  modified_base 4: mod_base = OTHER; note = 2'O-methyl cytidine
  modified_base 5: mod_base = OTHER; note = 2'-fluoro uridine
  modified_base 6: mod_base = OTHER; note = 2'O-methyl cytidine
  modified_base 7: mod_base = OTHER; note = 2'-fluoro cytidine
  modified_base 8: mod_base = OTHER; note = 2'O-methyl uridine
  modified_base 9: mod_base = OTHER; note = 2'-fluoro cytidine
  modified_base 10: mod_base = OTHER; note = 2'O-methyl cytidine
  modified_base 11: mod_base = OTHER; note = 2'-fluoro guanosine
  modified_base 12: mod_base = OTHER; note = 2'O-methyl cytidine
  modified_base 13: mod_base = OTHER; note = 2'-fluoro guanosine
  modified_base 14: mod_base = OTHER; note = 2'O-methyl adenosine
  modified_base 15: mod_base = OTHER; note = 2'-fluoro cytidine
  modified_base 16: mod_base = OTHER; note = 2'O-methyl guanosine
  modified_base 17: mod_base = OTHER; note = 2'-fluoro cytidine
  modified_base 18: mod_base = OTHER; note = 2'O-methyl guanosine
  modified_base 19: mod_base = OTHER; note = 2'-fluoro cytidine
  modified_base 20: mod_base = OTHER; note = 2'O-methyl guanosine phosphorothioate
  modified_base 21: mod_base = OTHER; note = 2'-fluoro cytidine
cacctcctccgcgacgcgcgc

SEQ ID NO: 1179 - RNA, 21 nt, synthetic construct
  source 1..21: mol_type = other RNA
  modified_base 1: mod_base = OTHER; note = 2'-fluoro cytidine phosphorothioate
  modified_base 2: mod_base = OTHER; note = 2'O-methyl cytidine phosphorothioate
  modified_base 3: mod_base = OTHER; note = 2'-fluoro uridine
  modified_base 4: mod_base = OTHER; note = 2'O-methyl cytidine
  modified_base 5: mod_base = OTHER; note = 2'-fluoro cytidine
  modified_base 6: mod_base = OTHER; note = 2'O-methyl uridine
  modified_base 7: mod_base = OTHER; note = 2'-fluoro cytidine
  modified_base 8: mod_base = OTHER; note = 2'O-methyl cytidine
  modified_base 9: mod_base = OTHER; note = 2'-fluoro guanosine
  modified_base 10: mod_base = OTHER; note = 2'O-methyl cytidine
  modified_base 11: mod_base = OTHER; note = 2'-fluoro guanosine
  modified_base 12: mod_base = OTHER; note = 2'O-methyl adenosine
  modified_base 13: mod_base = OTHER; note = 2'-fluoro cytidine
  modified_base 14: mod_base = OTHER; note = 2'O-methyl guanosine
  modified_base 15: mod_base = OTHER; note = 2'-fluoro cytidine
  modified_base 16: mod_base = OTHER; note = 2'O-methyl guanosine
  modified_base 17: mod_base = OTHER; note = 2'-fluoro cytidine
  modified_base 18: mod_base = OTHER; note = 2'O-methyl guanosine
  modified_base 19: mod_base = OTHER; note = 2'-fluoro cytidine
  modified_base 20: mod_base = OTHER; note = 2'O-methyl adenosine phosphorothioate
  modified_base 21: mod_base = OTHER; note = 2'-fluoro uridine
cctcctccgcgacgcgcgcat

SEQ ID NO: 1180 - RNA, 21 nt, synthetic construct
  source 1..21: mol_type = other RNA
  modified_base 1: mod_base = OTHER; note = 2'-fluoro cytidine phosphorothioate
  modified_base 2: mod_base = OTHER; note = 2'O-methyl uridine phosphorothioate
  modified_base 3: mod_base = OTHER; note = 2'-fluoro cytidine
  modified_base 4: mod_base = OTHER; note = 2'O-methyl cytidine
  modified_base 5: mod_base = OTHER; note = 2'-fluoro uridine
  modified_base 6: mod_base = OTHER; note = 2'O-methyl cytidine
  modified_base 7: mod_base = OTHER; note = 2'-fluoro cytidine
  modified_base 8: mod_base = OTHER; note = 2'O-methyl guanosine
  modified_base 9: mod_base = OTHER; note = 2'-fluoro cytidine
  modified_base 10: mod_base = OTHER; note = 2'O-methyl guanosine
  modified_base 11: mod_base = OTHER; note = 2'-fluoro adenosine
  modified_base 12: mod_base = OTHER; note = 2'O-methyl cytidine
  modified_base 13: mod_base = OTHER; note = 2'-fluoro guanosine
  modified_base 14: mod_base = OTHER; note = 2'O-methyl cytidine
  modified_base 15: mod_base = OTHER; note = 2'-fluoro guanosine
  modified_base 16: mod_base = OTHER; note = 2'O-methyl cytidine
  modified_base 17: mod_base = OTHER; note = 2'-fluoro guanosine
  modified_base 18: mod_base = OTHER; note = 2'O-methyl cytidine
  modified_base 19: mod_base = OTHER; note = 2'-fluoro adenosine
  modified_base 20: mod_base = OTHER; note = 2'O-methyl uridine phosphorothioate
  modified_base 21: mod_base = OTHER; note = 2'-fluoro guanosine
ctcctccgcgacgcgcgcatg

SEQ ID NO: 1181 - RNA, 21 nt, synthetic construct
  source 1..21: mol_type = other RNA
  modified_base 1: mod_base = OTHER; note = 2'-fluoro uridine phosphorothioate
  modified_base 2: mod_base = OTHER; note = 2'O-methyl cytidine phosphorothioate
  modified_base 3: mod_base = OTHER; note = 2'-fluoro cytidine
  modified_base 4: mod_base = OTHER; note = 2'O-methyl uridine
  modified_base 5: mod_base = OTHER; note = 2'-fluoro cytidine
  modified_base 6: mod_base = OTHER; note = 2'O-methyl cytidine
  modified_base 7: mod_base = OTHER; note = 2'-fluoro guanosine
  modified_base 8: mod_base = OTHER; note = 2'O-methyl cytidine
  modified_base 9: mod_base = OTHER; note = 2'-fluoro guanosine
  modified_base 10: mod_base = OTHER; note = 2'O-methyl adenosine
  modified_base 11: mod_base = OTHER; note = 2'-fluoro cytidine
  modified_base 12: mod_base = OTHER; note = 2'O-methyl guanosine
  modified_base 13: mod_base = OTHER; note = 2'-fluoro cytidine
  modified_base 14: mod_base = OTHER; note = 2'O-methyl guanosine
  modified_base 15: mod_base = OTHER; note = 2'-fluoro cytidine
  modified_base 16: mod_base = OTHER; note = 2'O-methyl guanosine
  modified_base 17: mod_base = OTHER; note = 2'-fluoro cytidine
  modified_base 18: mod_base = OTHER; note = 2'O-methyl adenosine
  modified_base 19: mod_base = OTHER; note = 2'-fluoro uridine
  modified_base 20: mod_base = OTHER; note = 2'O-methyl guanosine phosphorothioate
  modified_base 21: mod_base = OTHER; note = 2'-fluoro uridine
tcctccgcgacgcgcgcatgt

SEQ ID NO: 1182 - RNA, 21 nt, synthetic construct
  source 1..21: mol_type = other RNA
  modified_base 1: mod_base = OTHER; note = 2'-fluoro cytidine phosphorothioate
  modified_base 2: mod_base = OTHER; note = 2'O-methyl cytidine phosphorothioate
  modified_base 3: mod_base = OTHER; note = 2'-fluoro uridine
  modified_base 4: mod_base = OTHER; note = 2'O-methyl cytidine
  modified_base 5: mod_base = OTHER; note = 2'-fluoro cytidine
  modified_base 6: mod_base = OTHER; note = 2'O-methyl guanosine
  modified_base 7: mod_base = OTHER; note = 2'-fluoro cytidine
  modified_base 8: mod_base = OTHER; note = 2'O-methyl guanosine
  modified_base 9: mod_base = OTHER; note = 2'-fluoro adenosine
  modified_base 10: mod_base = OTHER; note = 2'O-methyl cytidine
  modified_base 11: mod_base = OTHER; note = 2'-fluoro guanosine
  modified_base 12: mod_base = OTHER; note = 2'O-methyl cytidine
  modified_base 13: mod_base = OTHER; note = 2'-fluoro guanosine
  modified_base 14: mod_base = OTHER; note = 2'O-methyl cytidine
  modified_base 15: mod_base = OTHER; note = 2'-fluoro guanosine
  modified_base 16: mod_base = OTHER; note = 2'O-methyl cytidine
  modified_base 17: mod_base = OTHER; note = 2'-fluoro adenosine
  modified_base 18: mod_base = OTHER; note = 2'O-methyl uridine
  modified_base 19: mod_base = OTHER; note = 2'-fluoro guanosine
  modified_base 20: mod_base = OTHER; note = 2'O-methyl uridine phosphorothioate
  modified_base 21: mod_base = OTHER; note = 2'-fluoro uridine
cctccgcgacgcgcgcatgtt

SEQ ID NO: 1183 - RNA, 21 nt, synthetic construct
  source 1..21: mol_type = other RNA
  modified_base 1: mod_base = OTHER; note = 2'-fluoro cytidine phosphorothioate
  modified_base 2: mod_base = OTHER; note = 2'O-methyl uridine phosphorothioate
  modified_base 3: mod_base = OTHER; note = 2'-fluoro cytidine
  modified_base 4: mod_base = OTHER; note = 2'O-methyl cytidine
  modified_base 5: mod_base = OTHER; note = 2'-fluoro guanosine
  modified_base 6: mod_base = OTHER; note = 2'O-methyl cytidine
  modified_base 7: mod_base = OTHER; note = 2'-fluoro guanosine
  modified_base 8: mod_base = OTHER; note = 2'O-methyl adenosine
  modified_base 9: mod_base = OTHER; note = 2'-fluoro cytidine
  modified_base 10: mod_base = OTHER; note = 2'O-methyl guanosine
  modified_base 11: mod_base = OTHER; note = 2'-fluoro cytidine
  modified_base 12: mod_base = OTHER; note = 2'O-methyl guanosine
  modified_base 13: mod_base = OTHER; note = 2'-fluoro cytidine
  modified_base 14: mod_base = OTHER; note = 2'O-methyl guanosine
  modified_base 15: mod_base = OTHER; note = 2'-fluoro cytidine
  modified_base 16: mod_base = OTHER; note = 2'O-methyl adenosine
  modified_base 17: mod_base = OTHER; note = 2'-fluoro uridine
  modified_base 18: mod_base = OTHER; note = 2'O-methyl guanosine
  modified_base 19: mod_base = OTHER; note = 2'-fluoro uridine
  modified_base 20: mod_base = OTHER; note = 2'O-methyl uridine phosphorothioate
  modified_base 21: mod_base = OTHER; note = 2'-fluoro guanosine
ctccgcgacgcgcgcatgttg

SEQ ID NO: 1184 - RNA, 21 nt, synthetic construct
  source 1..21: mol_type = other RNA
  modified_base 1: mod_base = OTHER; note = 2'-fluoro uridine phosphorothioate
  modified_base 2: mod_base = OTHER; note = 2'O-methyl cytidine phosphorothioate
  modified_base 3: mod_base = OTHER; note = 2'-fluoro cytidine
  modified_base 4: mod_base = OTHER; note = 2'O-methyl guanosine
  modified_base 5: mod_base = OTHER; note = 2'-fluoro cytidine
  modified_base 6: mod_base = OTHER; note = 2'O-methyl guanosine
  modified_base 7: mod_base = OTHER; note = 2'-fluoro adenosine
  modified_base 8: mod_base = OTHER; note = 2'O-methyl cytidine
  modified_base 9: mod_base = OTHER; note = 2'-fluoro guanosine
  modified_base 10: mod_base = OTHER; note = 2'O-methyl cytidine
  modified_base 11: mod_base = OTHER; note = 2'-fluoro guanosine
  modified_base 12: mod_base = OTHER; note = 2'O-methyl cytidine
  modified_base 13: mod_base = OTHER; note = 2'-fluoro guanosine
  modified_base 14: mod_base = OTHER; note = 2'O-methyl cytidine
  modified_base 15: mod_base = OTHER; note = 2'-fluoro adenosine
  modified_base 16: mod_base = OTHER; note = 2'O-methyl uridine
  modified_base 17: mod_base = OTHER; note = 2'-fluoro guanosine
  modified_base 18: mod_base = OTHER; note = 2'O-methyl uridine
  modified_base 19: mod_base = OTHER; note = 2'-fluoro uridine
  modified_base 20: mod_base = OTHER; note = 2'O-methyl guanosine phosphorothioate
  modified_base 21: mod_base = OTHER; note = 2'-fluoro uridine
tccgcgacgcgcgcatgttgt

SEQ ID NO: 1185 - RNA, 21 nt, synthetic construct
  source 1..21: mol_type = other RNA
  modified_base 1: mod_base = OTHER; note = 2'-fluoro cytidine phosphorothioate
  modified_base 2: mod_base = OTHER; note = 2'O-methyl cytidine phosphorothioate
  modified_base 3: mod_base = OTHER; note = 2'-fluoro guanosine
  modified_base 4: mod_base = OTHER; note = 2'O-methyl cytidine
  modified_base 5: mod_base = OTHER; note = 2'-fluoro guanosine
  modified_base 6: mod_base = OTHER; note = 2'O-methyl adenosine
  modified_base 7: mod_base = OTHER; note = 2'-fluoro cytidine
  modified_base 8: mod_base = OTHER; note = 2'O-methyl guanosine
  modified_base 9: mod_base = OTHER; note = 2'-fluoro cytidine
  modified_base 10: mod_base = OTHER; note = 2'O-methyl guanosine
  modified_base 11: mod_base = OTHER; note = 2'-fluoro cytidine
  modified_base 12: mod_base = OTHER; note = 2'O-methyl guanosine
  modified_base 13: mod_base = OTHER; note = 2'-fluoro cytidine
  modified_base 14: mod_base = OTHER; note = 2'O-methyl adenosine
  modified_base 15: mod_base = OTHER; note = 2'-fluoro uridine
  modified_base 16: mod_base = OTHER; note = 2'O-methyl guanosine
  modified_base 17: mod_base = OTHER; note = 2'-fluoro uridine
  modified_base 18: mod_base = OTHER; note = 2'O-methyl uridine
  modified_base 19: mod_base = OTHER; note = 2'-fluoro guanosine
  modified_base 20: mod_base = OTHER; note = 2'O-methyl uridine phosphorothioate
  modified_base 21: mod_base = OTHER; note = 2'-fluoro uridine
ccgcgacgcgcgcatgttgtt

SEQ ID NO: 1186 - RNA, 21 nt, synthetic construct
  source 1..21: mol_type = other RNA
  modified_base 1: mod_base = OTHER; note = 2'-fluoro guanosine phosphorothioate
  modified_base 2: mod_base = OTHER; note = 2'O-methyl cytidine phosphorothioate
  modified_base 3: mod_base = OTHER; note = 2'-fluoro guanosine
  modified_base 4: mod_base = OTHER; note = 2'O-methyl adenosine
  modified_base 5: mod_base = OTHER; note = 2'-fluoro cytidine
  modified_base 6: mod_base = OTHER; note = 2'O-methyl guanosine
  modified_base 7: mod_base = OTHER; note = 2'-fluoro cytidine
  modified_base 8: mod_base = OTHER; note = 2'O-methyl guanosine
  modified_base 9: mod_base = OTHER; note = 2'-fluoro cytidine
  modified_base 10: mod_base = OTHER; note = 2'O-methyl guanosine
  modified_base 11: mod_base = OTHER; note = 2'-fluoro cytidine
  modified_base 12: mod_base = OTHER; note = 2'O-methyl adenosine
  modified_base 13: mod_base = OTHER; note = 2'-fluoro uridine
  modified_base 14: mod_base = OTHER; note = 2'O-methyl guanosine
  modified_base 15: mod_base = OTHER; note = 2'-fluoro uridine
  modified_base 16: mod_base = OTHER; note = 2'O-methyl uridine
  modified_base 17: mod_base = OTHER; note = 2'-fluoro guanosine
  modified_base 18: mod_base = OTHER; note = 2'O-methyl uridine
  modified_base 19: mod_base = OTHER; note = 2'-fluoro uridine
  modified_base 20: mod_base = OTHER; note = 2'O-methyl cytidine phosphorothioate
  modified_base 21: mod_base = OTHER; note = 2'-fluoro guanosine
gcgacgcgcgcatgttgttcg

SEQ ID NO: 1187 - RNA, 21 nt, synthetic construct
  source 1..21: mol_type = other RNA
  modified_base 1: mod_base = OTHER; note = 2'-fluoro cytidine phosphorothioate
  modified_base 2: mod_base = OTHER; note = 2'O-methyl guanosine phosphorothioate
  modified_base 3: mod_base = OTHER; note = 2'-fluoro adenosine
  modified_base 4: mod_base = OTHER; note = 2'O-methyl cytidine
  modified_base 5: mod_base = OTHER; note = 2'-fluoro guanosine
  modified_base 6: mod_base = OTHER; note = 2'O-methyl cytidine
  modified_base 7: mod_base = OTHER; note = 2'-fluoro guanosine
  modified_base 8: mod_base = OTHER; note = 2'O-methyl cytidine
  modified_base 9: mod_base = OTHER; note = 2'-fluoro guanosine
  modified_base 10: mod_base = OTHER; note = 2'O-methyl cytidine
  modified_base 11: mod_base = OTHER; note = 2'-fluoro adenosine
  modified_base 12: mod_base = OTHER; note = 2'O-methyl uridine
  modified_base 13: mod_base = OTHER; note = 2'-fluoro guanosine
  modified_base 14: mod_base = OTHER; note = 2'O-methyl uridine
  modified_base 15: mod_base = OTHER; note = 2'-fluoro uridine
  modified_base 16: mod_base = OTHER; note = 2'O-methyl guanosine
  modified_base 17: mod_base = OTHER; note = 2'-fluoro uridine
  modified_base 18: mod_base = OTHER; note = 2'O-methyl uridine
  modified_base 19: mod_base = OTHER; note = 2'-fluoro cytidine
  modified_base 20: mod_base = OTHER; note = 2'O-methyl guanosine phosphorothioate
  modified_base 21: mod_base = OTHER; note = 2'-fluoro guanosine
cgacgcgcgcatgttgttcgg

SEQ ID NO: 1188 - RNA, 21 nt, synthetic construct
  source 1..21: mol_type = other RNA
  modified_base 1: mod_base = OTHER; note = 2'-fluoro guanosine phosphorothioate
  modified_base 2: mod_base = OTHER; note = 2'O-methyl adenosine phosphorothioate
  modified_base 3: mod_base = OTHER; note = 2'-fluoro cytidine
  modified_base 4: mod_base = OTHER; note = 2'O-methyl guanosine
  modified_base 5: mod_base = OTHER; note = 2'-fluoro cytidine
  modified_base 6: mod_base = OTHER; note = 2'O-methyl guanosine
  modified_base 7: mod_base = OTHER; note = 2'-fluoro cytidine
  modified_base 8: mod_base = OTHER; note = 2'O-methyl guanosine
  modified_base 9: mod_base = OTHER; note = 2'-fluoro cytidine
  modified_base 10: mod_base = OTHER; note = 2'O-methyl adenosine
  modified_base 11: mod_base = OTHER; note = 2'-fluoro uridine
  modified_base 12: mod_base = OTHER; note = 2'O-methyl guanosine
  modified_base 13: mod_base = OTHER; note = 2'-fluoro uridine
  modified_base 14: mod_base = OTHER; note = 2'O-methyl uridine
  modified_base 15: mod_base = OTHER; note = 2'-fluoro guanosine
  modified_base 16: mod_base = OTHER; note = 2'O-methyl uridine
  modified_base 17: mod_base = OTHER; note = 2'-fluoro uridine
  modified_base 18: mod_base = OTHER; note = 2'O-methyl cytidine
  modified_base 19: mod_base = OTHER; note = 2'-fluoro guanosine
  modified_base 20: mod_base = OTHER; note = 2'O-methyl guanosine phosphorothioate
  modified_base 21: mod_base = OTHER; note = 2'-fluoro cytidine
gacgcgcgcatgttgttcggc

SEQ ID NO: 1189 - RNA, 21 nt, synthetic construct
  source 1..21: mol_type = other RNA
  modified_base 1: mod_base = OTHER; note = 2'-fluoro uridine phosphorothioate
  modified_base 2: mod_base = OTHER; note = 2'O-methyl cytidine phosphorothioate
  modified_base 3: mod_base = OTHER; note = 2'-fluoro uridine
  modified_base 4: mod_base = OTHER; note = 2'O-methyl uridine
  modified_base 5: mod_base = OTHER; note = 2'-fluoro guanosine
  modified_base 6: mod_base = OTHER; note = 2'O-methyl uridine
  modified_base 7: mod_base = OTHER; note = 2'-fluoro guanosine
  modified_base 8: mod_base = OTHER; note = 2'O-methyl cytidine
  modified_base 9: mod_base = OTHER; note = 2'-fluoro guanosine
  modified_base 10: mod_base = OTHER; note = 2'O-methyl guanosine
  modified_base 11: mod_base = OTHER; note = 2'-fluoro adenosine
  modified_base 12: mod_base = OTHER; note = 2'O-methyl adenosine
  modified_base 13: mod_base = OTHER; note = 2'-fluoro guanosine
  modified_base 14: mod_base = OTHER; note = 2'O-methyl guanosine
  modified_base 15: mod_base = OTHER; note = 2'-fluoro cytidine
  modified_base 16: mod_base = OTHER; note = 2'O-methyl cytidine
  modified_base 17: mod_base = OTHER; note = 2'-fluoro adenosine
  modified_base 18: mod_base = OTHER; note = 2'O-methyl guanosine
  modified_base 19: mod_base = OTHER; note = 2'-fluoro guanosine
  modified_base 20: mod_base = OTHER; note = 2'O-methyl adenosine phosphorothioate
  modified_base 21: mod_base = OTHER; note = 2'-fluoro guanosine
tcttgtgcggaaggccaggag

SEQ ID NO: 1190 - RNA, 21 nt, synthetic construct
  source 1..21: mol_type = other RNA
  modified_base 1: mod_base = OTHER; note = 2'-fluoro cytidine phosphorothioate
  modified_base 2: mod_base = OTHER; note = 2'O-methyl uridine phosphorothioate
  modified_base 3: mod_base = OTHER; note = 2'-fluoro uridine
  modified_base 4: mod_base = OTHER; note = 2'O-methyl guanosine
  modified_base 5: mod_base = OTHER; note = 2'-fluoro uridine
  modified_base 6: mod_base = OTHER; note = 2'O-methyl guanosine
  modified_base 7: mod_base = OTHER; note = 2'-fluoro cytidine
  modified_base 8: mod_base = OTHER; note = 2'O-methyl guanosine
  modified_base 9: mod_base = OTHER; note = 2'-fluoro guanosine
  modified_base 10: mod_base = OTHER; note = 2'O-methyl adenosine
  modified_base 11: mod_base = OTHER; note = 2'-fluoro adenosine
  modified_base 12: mod_base = OTHER; note = 2'O-methyl guanosine
  modified_base 13: mod_base = OTHER; note = 2'-fluoro guanosine
  modified_base 14: mod_base = OTHER; note = 2'O-methyl cytidine
  modified_base 15: mod_base = OTHER; note = 2'-fluoro cytidine
  modified_base 16: mod_base = OTHER; note = 2'O-methyl adenosine
  modified_base 17: mod_base = OTHER; note = 2'-fluoro guanosine
  modified_base 18: mod_base = OTHER; note = 2'O-methyl guanosine
  modified_base 19: mod_base = OTHER; note = 2'-fluoro adenosine
  modified_base 20: mod_base = OTHER; note = 2'O-methyl guanosine phosphorothioate
  modified_base 21: mod_base = OTHER; note = 2'-fluoro uridine
cttgtgcggaaggccaggagt

SEQ ID NO: 1191 - RNA, 21 nt, synthetic construct
  source 1..21: mol_type = other RNA
  modified_base 1: mod_base = OTHER; note = 2'-fluoro uridine phosphorothioate
  modified_base 2: mod_base = OTHER; note = 2'O-methyl guanosine phosphorothioate
  modified_base 3: mod_base = OTHER; note = 2'-fluoro uridine
  modified_base 4: mod_base = OTHER; note = 2'O-methyl guanosine
  modified_base 5: mod_base = OTHER; note = 2'-fluoro cytidine
  modified_base 6: mod_base = OTHER; note = 2'O-methyl guanosine
  modified_base 7: mod_base = OTHER; note = 2'-fluoro guanosine
  modified_base 8: mod_base = OTHER; note = 2'O-methyl adenosine
  modified_base 9: mod_base = OTHER; note = 2'-fluoro adenosine
  modified_base 10: mod_base = OTHER; note = 2'O-methyl guanosine
  modified_base 11: mod_base = OTHER; note = 2'-fluoro guanosine
  modified_base 12: mod_base = OTHER; note = 2'O-methyl cytidine
  modified_base 13: mod_base = OTHER; note = 2'-fluoro cytidine
  modified_base 14: mod_base = OTHER; note = 2'O-methyl adenosine
  modified_base 15: mod_base = OTHER; note = 2'-fluoro guanosine
  modified_base 16: mod_base = OTHER; note = 2'O-methyl guanosine
  modified_base 17: mod_base = OTHER; note = 2'-fluoro adenosine
  modified_base 18: mod_base = OTHER; note = 2'O-methyl guanosine
  modified_base 19: mod_base = OTHER; note = 2'-fluoro uridine
  modified_base 20: mod_base = OTHER; note = 2'O-methyl cytidine phosphorothioate
  modified_base 21: mod_base = OTHER; note = 2'-fluoro guanosine
tgtgcggaaggccaggagtcg

SEQ ID NO: 1192 - RNA, 21 nt, synthetic construct
  source 1..21: mol_type = other RNA
  modified_base 1: mod_base = OTHER; note = 2'-fluoro uridine phosphorothioate
  modified_base 2: mod_base = OTHER; note = 2'O-methyl guanosine phosphorothioate
  modified_base 3: mod_base = OTHER; note = 2'-fluoro cytidine
  modified_base 4: mod_base = OTHER; note = 2'O-methyl guanosine
  modified_base 5: mod_base = OTHER; note = 2'-fluoro guanosine
  modified_base 6: mod_base = OTHER; note = 2'O-methyl adenosine
  modified_base 7: mod_base = OTHER; note = 2'-fluoro adenosine
  modified_base 8: mod_base = OTHER; note = 2'O-methyl guanosine
  modified_base 9: mod_base = OTHER; note = 2'-fluoro guanosine
  modified_base 10: mod_base = OTHER; note = 2'O-methyl cytidine
  modified_base 11: mod_base = OTHER; note = 2'-fluoro cytidine
  modified_base 12: mod_base = OTHER; note = 2'O-methyl adenosine
  modified_base 13: mod_base = OTHER; note = 2'-fluoro guanosine
  modified_base 14: mod_base = OTHER; note = 2'O-methyl guanosine
  modified_base 15: mod_base = OTHER; note = 2'-fluoro adenosine
  modified_base 16: mod_base = OTHER; note = 2'O-methyl guanosine
  modified_base 17: mod_base = OTHER; note = 2'-fluoro uridine
  modified_base 18: mod_base = OTHER; note = 2'O-methyl cytidine
  modified_base 19: mod_base = OTHER; note = 2'-fluoro guanosine
  modified_base 20: mod_base = OTHER; note = 2'O-methyl guanosine phosphorothioate
  modified_base 21: mod_base = OTHER; note = 2'-fluoro adenosine
tgcggaaggccaggagtcgga

SEQ ID NO: 1193 - RNA, 21 nt, synthetic construct
  source 1..21: mol_type = other RNA
  modified_base 1: mod_base = OTHER; note = 2'-fluoro cytidine phosphorothioate
  modified_base 2: mod_base = OTHER; note = 2'O-methyl guanosine phosphorothioate
  modified_base 3: mod_base = OTHER; note = 2'-fluoro guanosine
  modified_base 4: mod_base = OTHER; note = 2'O-methyl adenosine
  modified_base 5: mod_base = OTHER; note = 2'-fluoro adenosine
  modified_base 6: mod_base = OTHER; note = 2'O-methyl guanosine
  modified_base 7: mod_base = OTHER; note = 2'-fluoro guanosine
  modified_base 8: mod_base = OTHER; note = 2'O-methyl cytidine
  modified_base 9: mod_base = OTHER; note = 2'-fluoro cytidine
  modified_base 10: mod_base = OTHER; note = 2'O-methyl adenosine
  modified_base 11: mod_base = OTHER; note = 2'-fluoro guanosine
  modified_base 12: mod_base = OTHER; note = 2'O-methyl guanosine
  modified_base 13: mod_base = OTHER; note = 2'-fluoro adenosine
  modified_base 14: mod_base = OTHER; note = 2'O-methyl guanosine
  modified_base 15: mod_base = OTHER; note = 2'-fluoro uridine
  modified_base 16: mod_base = OTHER; note = 2'O-methyl cytidine
  modified_base 17: mod_base = OTHER; note = 2'-fluoro guanosine
  modified_base 18: mod_base = OTHER; note = 2'O-methyl guanosine
  modified_base 19: mod_base = OTHER; note = 2'-fluoro adenosine
  modified_base 20: mod_base = OTHER; note = 2'O-methyl adenosine phosphorothioate
  modified_base 21: mod_base = OTHER; note = 2'-fluoro cytidine
cggaaggccaggagtcggaac

SEQ ID NO: 1194 - RNA, 21 nt, synthetic construct
  source 1..21: mol_type = other RNA
  modified_base 1: mod_base = OTHER; note = 2'-fluoro adenosine phosphorothioate
  modified_base 2: mod_base = OTHER; note = 2'O-methyl adenosine phosphorothioate
  modified_base 3: mod_base = OTHER; note = 2'-fluoro guanosine
  modified_base 4: mod_base = OTHER; note = 2'O-methyl guanosine
  modified_base 5: mod_base = OTHER; note = 2'-fluoro cytidine
  modified_base 6: mod_base = OTHER; note = 2'O-methyl cytidine
  modified_base 7: mod_base = OTHER; note = 2'-fluoro adenosine
  modified_base 8: mod_base = OTHER; note = 2'O-methyl guanosine
  modified_base 9: mod_base = OTHER; note = 2'-fluoro guanosine
  modified_base 10: mod_base = OTHER; note = 2'O-methyl adenosine
  modified_base 11: mod_base = OTHER; note = 2'-fluoro guanosine
  modified_base 12: mod_base = OTHER; note = 2'O-methyl uridine
  modified_base 13: mod_base = OTHER; note = 2'-fluoro cytidine
  modified_base 14: mod_base = OTHER; note = 2'O-methyl guanosine
  modified_base 15: mod_base = OTHER; note = 2'-fluoro guanosine
  modified_base 16: mod_base = OTHER; note = 2'O-methyl adenosine
  modified_base 17: mod_base = OTHER; note = 2'-fluoro adenosine
  modified_base 18: mod_base = OTHER; note = 2'O-methyl cytidine
  modified_base 19: mod_base = OTHER; note = 2'-fluoro adenosine
  modified_base 20: mod_base = OTHER; note = 2'O-methyl uridine phosphorothioate
  modified_base 21: mod_base = OTHER; note = 2'-fluoro uridine
aaggccaggagtcggaacatt

SEQ ID NO: 1195 - RNA, 21 nt, synthetic construct
  source 1..21: mol_type = other RNA
  modified_base 1: mod_base = OTHER; note = 2'-fluoro adenosine phosphorothioate
  modified_base 2: mod_base = OTHER; note = 2'O-methyl guanosine phosphorothioate
  modified_base 3: mod_base = OTHER; note = 2'-fluoro guanosine
  modified_base 4: mod_base = OTHER; note = 2'O-methyl cytidine
  modified_base 5: mod_base = OTHER; note = 2'-fluoro cytidine
  modified_base 6: mod_base = OTHER; note = 2'O-methyl adenosine
  modified_base 7: mod_base = OTHER; note = 2'-fluoro guanosine
  modified_base 8: mod_base = OTHER; note = 2'O-methyl guanosine
  modified_base 9: mod_base = OTHER; note = 2'-fluoro adenosine
  modified_base 10: mod_base = OTHER; note = 2'O-methyl guanosine
  modified_base 11: mod_base = OTHER; note = 2'-fluoro uridine
  modified_base 12: mod_base = OTHER; note = 2'O-methyl cytidine
  modified_base 13: mod_base = OTHER; note = 2'-fluoro guanosine
  modified_base 14: mod_base = OTHER; note = 2'O-methyl guanosine
  modified_base 15: mod_base = OTHER; note = 2'-fluoro adenosine
  modified_base 16: mod_base = OTHER; note = 2'O-methyl adenosine
  modified_base 17: mod_base = OTHER; note = 2'-fluoro cytidine
  modified_base 18: mod_base = OTHER; note = 2'O-methyl adenosine
  modified_base 19: mod_base = OTHER; note = 2'-fluoro uridine
  modified_base 20: mod_base = OTHER; note = 2'O-methyl uridine phosphorothioate
  modified_base 21: mod_base = OTHER; note = 2'-fluoro guanosine
aggccaggagtcggaacattg

SEQ ID NO: 1196 - RNA, 21 nt, synthetic construct
  source 1..21: mol_type = other RNA
  modified_base 1: mod_base = OTHER; note = 2'-fluoro guanosine phosphorothioate
  modified_base 2: mod_base = OTHER; note = 2'O-methyl guanosine phosphorothioate
  modified_base 3: mod_base = OTHER; note = 2'-fluoro cytidine
  modified_base 4: mod_base = OTHER; note = 2'O-methyl cytidine
  modified_base 5: mod_base = OTHER; note = 2'-fluoro adenosine
  modified_base 6: mod_base = OTHER; note = 2'O-methyl guanosine
  modified_base 7: mod_base = OTHER; note = 2'-fluoro guanosine
  modified_base 8: mod_base = OTHER; note = 2'O-methyl adenosine
  modified_base 9: mod_base = OTHER; note = 2'-fluoro guanosine
  modified_base 10: mod_base = OTHER; note = 2'O-methyl uridine
  modified_base 11: mod_base = OTHER; note = 2'-fluoro cytidine
  modified_base 12: mod_base = OTHER; note = 2'O-methyl guanosine
  modified_base 13: mod_base = OTHER; note = 2'-fluoro guanosine
  modified_base 14: mod_base = OTHER; note = 2'O-methyl adenosine
  modified_base 15: mod_base = OTHER; note = 2'-fluoro adenosine
  modified_base 16: mod_base = OTHER; note = 2'O-methyl cytidine
  modified_base 17: mod_base = OTHER; note = 2'-fluoro adenosine
  modified_base 18: mod_base = OTHER; note = 2'O-methyl uridine
  modified_base 19: mod_base = OTHER; note = 2'-fluoro uridine
  modified_base 20: mod_base = OTHER; note = 2'O-methyl guanosine phosphorothioate
  modified_base 21: mod_base = OTHER; note = 2'-fluoro guanosine
ggccaggagtcggaacattgg

SEQ ID NO: 1197 - RNA, 21 nt, synthetic construct
  source 1..21: mol_type = other RNA
  modified_base 1: mod_base = OTHER; note = 2'-fluoro adenosine phosphorothioate
  modified_base 2: mod_base = OTHER; note = 2'O-methyl guanosine phosphorothioate
  modified_base 3: mod_base = OTHER; note = 2'-fluoro guanosine
  modified_base 4: mod_base = OTHER; note = 2'O-methyl adenosine
  modified_base 5: mod_base = OTHER; note = 2'-fluoro guanosine
  modified_base 6: mod_base = OTHER; note = 2'O-methyl uridine
  modified_base 7: mod_base = OTHER; note = 2'-fluoro cytidine
  modified_base 8: mod_base = OTHER; note = 2'O-methyl guanosine
  modified_base 9: mod_base = OTHER; note = 2'-fluoro guanosine
  modified_base 10: mod_base = OTHER; note = 2'O-methyl adenosine
  modified_base 11: mod_base = OTHER; note = 2'-fluoro adenosine
  modified_base 12: mod_base = OTHER; note = 2'O-methyl cytidine
  modified_base 13: mod_base = OTHER; note = 2'-fluoro adenosine
  modified_base 14: mod_base = OTHER; note = 2'O-methyl uridine
  modified_base 15: mod_base = OTHER; note = 2'-fluoro uridine
  modified_base 16: mod_base = OTHER; note = 2'O-methyl guanosine
  modified_base 17: mod_base = OTHER; note = 2'-fluoro guanosine
  modified_base 18: mod_base = OTHER; note = 2'O-methyl cytidine
  modified_base 19: mod_base = OTHER; note = 2'-fluoro adenosine
  modified_base 20: mod_base = OTHER; note = 2'O-methyl uridine phosphorothioate
  modified_base 21: mod_base = OTHER; note = 2'-fluoro cytidine
aggagtcggaacattggcatc

SEQ ID NO: 1198 - RNA, 21 nt, synthetic construct
  source 1..21: mol_type = other RNA
  modified_base 1: mod_base = OTHER; note = 2'-fluoro cytidine phosphorothioate
  modified_base 2: mod_base = OTHER; note = 2'O-methyl cytidine phosphorothioate
  modified_base 3: mod_base = OTHER; note = 2'-fluoro adenosine
  modified_base 4: mod_base = OTHER; note = 2'O-methyl adenosine
  modified_base 5: mod_base = OTHER; note = 2'-fluoro uridine
  modified_base 6: mod_base = OTHER; note = 2'O-methyl guanosine
  modified_base 7: mod_base = OTHER; note = 2'-fluoro uridine
  modified_base 8: mod_base = OTHER; note = 2'O-methyl cytidine
  modified_base 9: mod_base = OTHER; note = 2'-fluoro cytidine
  modified_base 10: mod_base = OTHER; note = 2'O-methyl adenosine
  modified_base 11: mod_base = OTHER; note = 2'-fluoro cytidine
  modified_base 12: mod_base = OTHER; note = 2'O-methyl cytidine
  modified_base 13: mod_base = OTHER; note = 2'-fluoro adenosine
  modified_base 14: mod_base = OTHER; note = 2'O-methyl guanosine
  modified_base 15: mod_base = OTHER; note = 2'-fluoro cytidine
  modified_base 16: mod_base = OTHER; note = 2'O-methyl uridine
  modified_base 17: mod_base = OTHER; note = 2'-fluoro cytidine
  modified_base 18: mod_base = OTHER; note = 2'O-methyl adenosine
  modified_base 19: mod_base = OTHER; note = 2'-fluoro uridine
  modified_base 20: mod_base = OTHER; note = 2'O-methyl cytidine phosphorothioate
  modified_base 21: mod_base = OTHER; note = 2'-fluoro uridine
ccaatgtccaccagctcatct

SEQ ID NO: 1199 - RNA, 21 nt, synthetic construct
  source 1..21: mol_type = other RNA
  modified_base 1: mod_base = OTHER; note = 2'-fluoro cytidine phosphorothioate
  modified_base 2: mod_base = OTHER; note = 2'O-methyl adenosine phosphorothioate
  modified_base 3: mod_base = OTHER; note = 2'-fluoro adenosine
  modified_base 4: mod_base = OTHER; note = 2'O-methyl uridine
  modified_base 5: mod_base = OTHER; note = 2'-fluoro guanosine
  modified_base 6: mod_base = OTHER; note = 2'O-methyl uridine
  modified_base 7: mod_base = OTHER; note = 2'-fluoro cytidine
  modified_base 8: mod_base = OTHER; note = 2'O-methyl cytidine
  modified_base 9: mod_base = OTHER; note = 2'-fluoro adenosine
  modified_base 10: mod_base = OTHER; note = 2'O-methyl cytidine
  modified_base 11: mod_base = OTHER; note = 2'-fluoro cytidine
  modified_base 12: mod_base = OTHER; note = 2'O-methyl adenosine
  modified_base 13: mod_base = OTHER; note = 2'-fluoro guanosine
  modified_base 14: mod_base = OTHER; note = 2'O-methyl cytidine
  modified_base 15: mod_base = OTHER; note = 2'-fluoro uridine
  modified_base 16: mod_base = OTHER; note = 2'O-methyl cytidine
  modified_base 17: mod_base = OTHER; note = 2'-fluoro adenosine
  modified_base 18: mod_base = OTHER; note = 2'O-methyl uridine
  modified_base 19: mod_base = OTHER; note = 2'-fluoro cytidine
  modified_base 20: mod_base = OTHER; note = 2'O-methyl uridine phosphorothioate
  modified_base 21: mod_base = OTHER; note = 2'-fluoro cytidine
caatgtccaccagctcatctc

SEQ ID NO: 1200 - RNA, 21 nt, synthetic construct
  source 1..21: mol_type = other RNA
  modified_base 1: mod_base = OTHER; note = 2'-fluoro adenosine phosphorothioate
  modified_base 2: mod_base = OTHER; note = 2'O-methyl uridine phosphorothioate
  modified_base 3: mod_base = OTHER; note = 2'-fluoro guanosine
  modified_base 4: mod_base = OTHER; note = 2'O-methyl uridine
  modified_base 5: mod_base = OTHER; note = 2'-fluoro cytidine
  modified_base 6: mod_base = OTHER; note = 2'O-methyl cytidine
  modified_base 7: mod_base = OTHER; note = 2'-fluoro adenosine
  modified_base 8: mod_base = OTHER; note = 2'O-methyl cytidine
  modified_base 9: mod_base = OTHER; note = 2'-fluoro cytidine
  modified_base 10: mod_base = OTHER; note = 2'O-methyl adenosine
  modified_base 11: mod_base = OTHER; note = 2'-fluoro guanosine
  modified_base 12: mod_base = OTHER; note = 2'O-methyl cytidine
  modified_base 13: mod_base = OTHER; note = 2'-fluoro uridine
  modified_base 14: mod_base = OTHER; note = 2'O-methyl cytidine
  modified_base 15: mod_base = OTHER; note = 2'-fluoro adenosine
  modified_base 16: mod_base = OTHER; note = 2'O-methyl uridine
  modified_base 17: mod_base = OTHER; note = 2'-fluoro cytidine
  modified_base 18: mod_base = OTHER; note = 2'O-methyl uridine
  modified_base 19: mod_base = OTHER; note = 2'-fluoro cytidine
  modified_base 20: mod_base = OTHER; note = 2'O-methyl cytidine phosphorothioate
  modified_base 21: mod_base = OTHER; note = 2'-fluoro guanosine
atgtccaccagctcatctccg

SEQ ID NO: 1201 - RNA, 21 nt, synthetic construct
  source 1..21: mol_type = other RNA
  modified_base 1: mod_base = OTHER; note = 2'-fluoro uridine phosphorothioate
  modified_base 2: mod_base = OTHER; note = 2'O-methyl guanosine phosphorothioate
  modified_base 3: mod_base = OTHER; note = 2'-fluoro uridine
  modified_base 4: mod_base = OTHER; note = 2'O-methyl cytidine
  modified_base 5: mod_base = OTHER; note = 2'-fluoro cytidine
  modified_base 6: mod_base = OTHER; note = 2'O-methyl adenosine
  modified_base 7: mod_base = OTHER; note = 2'-fluoro cytidine
  modified_base 8: mod_base = OTHER; note = 2'O-methyl cytidine
  modified_base 9: mod_base = OTHER; note = 2'-fluoro adenosine
  modified_base 10: mod_base = OTHER; note = 2'O-methyl guanosine
  modified_base 11: mod_base = OTHER; note = 2'-fluoro cytidine
  modified_base 12: mod_base = OTHER; note = 2'O-methyl uridine
  modified_base 13: mod_base = OTHER; note = 2'-fluoro cytidine
  modified_base 14: mod_base = OTHER; note = 2'O-methyl adenosine
  modified_base 15: mod_base = OTHER; note = 2'-fluoro uridine
  modified_base 16: mod_base = OTHER; note = 2'O-methyl cytidine
  modified_base 17: mod_base = OTHER; note = 2'-fluoro uridine
  modified_base 18: mod_base = OTHER; note = 2'O-methyl cytidine
  modified_base 19: mod_base = OTHER; note = 2'-fluoro cytidine
  modified_base 20: mod_base = OTHER; note = 2'O-methyl guanosine phosphorothioate
  modified_base 21: mod_base = OTHER; note = 2'-fluoro guanosine
tgtccaccagctcatctccgg

SEQ ID NO: 1202 - RNA, 21 nt, synthetic construct
  source 1..21: mol_type = other RNA
  modified_base 1: mod_base = OTHER; note = 2'-fluoro guanosine phosphorothioate
  modified_base 2: mod_base = OTHER; note = 2'O-methyl uridine phosphorothioate
  modified_base 3: mod_base = OTHER; note = 2'-fluoro cytidine
  modified_base 4: mod_base = OTHER; note = 2'O-methyl cytidine
  modified_base 5: mod_base = OTHER; note = 2'-fluoro adenosine
  modified_base 6: mod_base = OTHER; note = 2'O-methyl cytidine
  modified_base 7: mod_base = OTHER; note = 2'-fluoro cytidine
  modified_base 8: mod_base = OTHER; note = 2'O-methyl adenosine
  modified_base 9: mod_base = OTHER; note = 2'-fluoro guanosine
  modified_base 10: mod_base = OTHER; note = 2'O-methyl cytidine
  modified_base 11: mod_base = OTHER; note = 2'-fluoro uridine
  modified_base 12: mod_base = OTHER; note = 2'O-methyl cytidine
  modified_base 13: mod_base = OTHER; note = 2'-fluoro adenosine
  modified_base 14: mod_base = OTHER; note = 2'O-methyl uridine
  modified_base 15: mod_base = OTHER; note = 2'-fluoro cytidine
  modified_base 16: mod_base = OTHER; note = 2'O-methyl uridine
  modified_base 17: mod_base = OTHER; note = 2'-fluoro cytidine
  modified_base 18: mod_base = OTHER; note = 2'O-methyl cytidine
  modified_base 19: mod_base = OTHER; note = 2'-fluoro guanosine
  modified_base 20: mod_base = OTHER; note = 2'O-methyl guanosine phosphorothioate
  modified_base 21: mod_base = OTHER; note = 2'-fluoro cytidine
gtccaccagctcatctccggc

SEQ ID NO: 1203 - RNA, 21 nt, synthetic construct
  source 1..21: mol_type = other RNA
  modified_base 1: mod_base = OTHER; note = 2'-fluoro uridine phosphorothioate
  modified_base 2: mod_base = OTHER; note = 2'O-methyl cytidine phosphorothioate
  modified_base 3: mod_base = OTHER; note = 2'-fluoro cytidine
  modified_base 4: mod_base = OTHER; note = 2'O-methyl adenosine
  modified_base 5: mod_base = OTHER; note = 2'-fluoro cytidine
  modified_base 6: mod_base = OTHER; note = 2'O-methyl cytidine
  modified_base 7: mod_base = OTHER; note = 2'-fluoro adenosine
  modified_base 8: mod_base = OTHER; note = 2'O-methyl guanosine
  modified_base 9: mod_base = OTHER; note = 2'-fluoro cytidine
  modified_base 10: mod_base = OTHER; note = 2'O-methyl uridine
  modified_base 11: mod_base = OTHER; note = 2'-fluoro cytidine
  modified_base 12: mod_base = OTHER; note = 2'O-methyl adenosine
  modified_base 13: mod_base = OTHER; note = 2'-fluoro uridine
  modified_base 14: mod_base = OTHER; note = 2'O-methyl cytidine
  modified_base 15: mod_base = OTHER; note = 2'-fluoro uridine
  modified_base 16: mod_base = OTHER; note = 2'O-methyl cytidine
  modified_base 17: mod_base = OTHER; note = 2'-fluoro cytidine
  modified_base 18: mod_base = OTHER; note = 2'O-methyl guanosine
  modified_base 19: mod_base = OTHER; note = 2'-fluoro guanosine
  modified_base 20: mod_base = OTHER; note = 2'O-methyl cytidine phosphorothioate
  modified_base 21: mod_base = OTHER; note = 2'-fluoro adenosine
tccaccagctcatctccggca

SEQ ID NO: 1204 - RNA, 21 nt, synthetic construct
  source 1..21: mol_type = other RNA
  modified_base 1: mod_base = OTHER; note = 2'-fluoro cytidine phosphorothioate
  modified_base 2: mod_base = OTHER; note = 2'O-methyl adenosine phosphorothioate
  modified_base 3: mod_base = OTHER; note = 2'-fluoro cytidine
  modified_base 4: mod_base = OTHER; note = 2'O-methyl cytidine
  modified_base 5: mod_base = OTHER; note = 2'-fluoro adenosine
  modified_base 6: mod_base = OTHER; note = 2'O-methyl guanosine
  modified_base 7: mod_base = OTHER; note = 2'-fluoro cytidine
  modified_base 8: mod_base = OTHER; note = 2'O-methyl uridine
  modified_base 9: mod_base = OTHER; note = 2'-fluoro cytidine
  modified_base 10: mod_base = OTHER; note = 2'O-methyl adenosine
  modified_base 11: mod_base = OTHER; note = 2'-fluoro uridine
  modified_base 12: mod_base = OTHER; note = 2'O-methyl cytidine
  modified_base 13: mod_base = OTHER; note = 2'-fluoro uridine
  modified_base 14: mod_base = OTHER; note = 2'O-methyl cytidine
  modified_base 15: mod_base = OTHER; note = 2'-fluoro cytidine
  modified_base 16: mod_base = OTHER; note = 2'O-methyl guanosine
  modified_base 17: mod_base = OTHER; note = 2'-fluoro guanosine
  modified_base 18: mod_base = OTHER; note = 2'O-methyl cytidine
  modified_base 19: mod_base = OTHER; note = 2'-fluoro adenosine
  modified_base 20: mod_base = OTHER; note = 2'O-methyl adenosine phosphorothioate
  modified_base 21: mod_base = OTHER; note = 2'-fluoro adenosine
caccagctcatctccggcaaa

SEQ ID NO: 1205 - RNA, 21 nt, synthetic construct
  source 1..21: mol_type = other RNA
  modified_base 1: mod_base = OTHER; note = 2'-fluoro uridine phosphorothioate
  modified_base 2: mod_base = OTHER; note = 2'O-methyl cytidine phosphorothioate
  modified_base 3: mod_base = OTHER; note = 2'-fluoro uridine
  modified_base 4: mod_base = OTHER; note = 2'O-methyl uridine
  modified_base 5: mod_base = OTHER; note = 2'-fluoro adenosine
  modified_base 6: mod_base = OTHER; note = 2'O-methyl cytidine
  modified_base 7: mod_base = OTHER; note = 2'-fluoro cytidine
  modified_base 8: mod_base = OTHER; note = 2'O-methyl adenosine
  modified_base 9: mod_base = OTHER; note = 2'-fluoro guanosine
  modified_base 10: mod_base = OTHER; note = 2'O-methyl adenosine
  modified_base 11: mod_base = OTHER; note = 2'-fluoro guanosine
  modified_base 12: mod_base = OTHER; note = 2'O-methyl uridine
  modified_base 13: mod_base = OTHER; note = 2'-fluoro guanosine
  modified_base 14: mod_base = OTHER; note = 2'O-methyl uridine
  modified_base 15: mod_base = OTHER; note = 2'-fluoro cytidine
  modified_base 16: mod_base = OTHER; note = 2'O-methyl uridine
  modified_base 17: mod_base = OTHER; note = 2'-fluoro guanosine
  modified_base 18: mod_base = OTHER; note = 2'O-methyl adenosine
  modified_base 19: mod_base = OTHER; note = 2'-fluoro uridine
  modified_base 20: mod_base = OTHER; note = 2'O-methyl guanosine phosphorothioate
  modified_base 21: mod_base = OTHER; note = 2'-fluoro guanosine
tcttaccagagtgtctgatgg

SEQ ID NO: 1206 - RNA, 21 nt, synthetic construct
  source 1..21: mol_type = other RNA
  modified_base 1: mod_base = OTHER; note = 2'-fluoro cytidine phosphorothioate
  modified_base 2: mod_base = OTHER; note = 2'O-methyl uridine phosphorothioate
  modified_base 3: mod_base = OTHER; note = 2'-fluoro uridine
  modified_base 4: mod_base = OTHER; note = 2'O-methyl adenosine
  modified_base 5: mod_base = OTHER; note = 2'-fluoro cytidine
  modified_base 6: mod_base = OTHER; note = 2'O-methyl cytidine
  modified_base 7: mod_base = OTHER; note = 2'-fluoro adenosine
  modified_base 8: mod_base = OTHER; note = 2'O-methyl guanosine
  modified_base 9: mod_base = OTHER; note = 2'-fluoro adenosine
  modified_base 10: mod_base = OTHER; note = 2'O-methyl guanosine
  modified_base 11: mod_base = OTHER; note = 2'-fluoro uridine
  modified_base 12: mod_base = OTHER; note = 2'O-methyl guanosine
  modified_base 13: mod_base = OTHER; note = 2'-fluoro uridine
  modified_base 14: mod_base = OTHER; note = 2'O-methyl cytidine
  modified_base 15: mod_base = OTHER; note = 2'-fluoro uridine
  modified_base 16: mod_base = OTHER; note = 2'O-methyl guanosine
  modified_base 17: mod_base = OTHER; note = 2'-fluoro adenosine
  modified_base 18: mod_base = OTHER; note = 2'O-methyl uridine
  modified_base 19: mod_base = OTHER; note = 2'-fluoro guanosine
  modified_base 20: mod_base = OTHER; note = 2'O-methyl guanosine phosphorothioate
  modified_base 21: mod_base = OTHER; note = 2'-fluoro guanosine
cttaccagagtgtctgatggg

SEQ ID NO: 1207 - RNA, 21 nt, synthetic construct
  source 1..21: mol_type = other RNA
  modified_base 1: mod_base = OTHER; note = 2'-fluoro uridine phosphorothioate
  modified_base 2: mod_base = OTHER; note = 2'O-methyl uridine phosphorothioate
  modified_base 3: mod_base = OTHER; note = 2'-fluoro adenosine
  modified_base 4: mod_base = OTHER; note = 2'O-methyl cytidine
  modified_base 5: mod_base = OTHER; note = 2'-fluoro cytidine
  modified_base 6: mod_base = OTHER; note = 2'O-methyl adenosine
  modified_base 7: mod_base = OTHER; note = 2'-fluoro guanosine
  modified_base 8: mod_base = OTHER; note = 2'O-methyl adenosine
  modified_base 9: mod_base = OTHER; note = 2'-fluoro guanosine
  modified_base 10: mod_base = OTHER; note = 2'O-methyl uridine
  modified_base 11: mod_base = OTHER; note = 2'-fluoro guanosine
  modified_base 12: mod_base = OTHER; note = 2'O-methyl uridine
  modified_base 13: mod_base = OTHER; note = 2'-fluoro cytidine
  modified_base 14: mod_base = OTHER; note = 2'O-methyl uridine
  modified_base 15: mod_base = OTHER; note = 2'-fluoro guanosine
  modified_base 16: mod_base = OTHER; note = 2'O-methyl adenosine
  modified_base 17: mod_base = OTHER; note = 2'-fluoro uridine
  modified_base 18: mod_base = OTHER; note = 2'O-methyl guanosine
  modified_base 19: mod_base = OTHER; note = 2'-fluoro guanosine
  modified_base 20: mod_base = OTHER; note = 2'O-methyl guanosine phosphorothioate
  modified_base 21: mod_base = OTHER; note = 2'-fluoro guanosine
ttaccagagtgtctgatgggg

SEQ ID NO: 1208 - RNA, 21 nt, synthetic construct
  source 1..21: mol_type = other RNA
  modified_base 1: mod_base = OTHER; note = 2'-fluoro uridine phosphorothioate
  modified_base 2: mod_base = OTHER; note = 2'O-methyl adenosine phosphorothioate
  modified_base 3: mod_base = OTHER; note = 2'-fluoro cytidine
  modified_base 4: mod_base = OTHER; note = 2'O-methyl cytidine
  modified_base 5: mod_base = OTHER; note = 2'-fluoro adenosine
  modified_base 6: mod_base = OTHER; note = 2'O-methyl guanosine
  modified_base 7: mod_base = OTHER; note = 2'-fluoro adenosine
  modified_base 8: mod_base = OTHER; note = 2'O-methyl guanosine
  modified_base 9: mod_base = OTHER; note = 2'-fluoro uridine
  modified_base 10: mod_base = OTHER; note = 2'O-methyl guanosine
  modified_base 11: mod_base = OTHER; note = 2'-fluoro uridine
  modified_base 12: mod_base = OTHER; note = 2'O-methyl cytidine
  modified_base 13: mod_base = OTHER; note = 2'-fluoro uridine
  modified_base 14: mod_base = OTHER; note = 2'O-methyl guanosine
  modified_base 15: mod_base = OTHER; note = 2'-fluoro adenosine
  modified_base 16: mod_base = OTHER; note = 2'O-methyl uridine
  modified_base 17: mod_base = OTHER; note = 2'-fluoro guanosine
  modified_base 18: mod_base = OTHER; note = 2'O-methyl guanosine
  modified_base 19: mod_base = OTHER; note = 2'-fluoro guanosine
  modified_base 20: mod_base = OTHER; note = 2'O-methyl guanosine phosphorothioate
  modified_base 21: mod_base = OTHER; note = 2'-fluoro adenosine
taccagagtgtctgatgggga

SEQ ID NO: 1209 - RNA, 21 nt, synthetic construct
  source 1..21: mol_type = other RNA
  modified_base 1: mod_base = OTHER; note = 2'-fluoro cytidine phosphorothioate
  modified_base 2: mod_base = OTHER; note = 2'O-methyl adenosine phosphorothioate
  modified_base 3: mod_base = OTHER; note = 2'-fluoro guanosine
  modified_base 4: mod_base = OTHER; note = 2'O-methyl adenosine
  modified_base 5: mod_base = OTHER; note = 2'-fluoro guanosine
  modified_base 6: mod_base = OTHER; note = 2'O-methyl uridine
  modified_base 7: mod_base = OTHER; note = 2'-fluoro guanosine
  modified_base 8: mod_base = OTHER; note = 2'O-methyl uridine
  modified_base 9: mod_base = OTHER; note = 2'-fluoro cytidine
  modified_base 10: mod_base = OTHER; note = 2'O-methyl uridine
  modified_base 11: mod_base = OTHER; note = 2'-fluoro guanosine
  modified_base 12: mod_base = OTHER; note = 2'O-methyl adenosine
  modified_base 13: mod_base = OTHER; note = 2'-fluoro uridine
  modified_base 14: mod_base = OTHER; note = 2'O-methyl guanosine
  modified_base 15: mod_base = OTHER; note = 2'-fluoro guanosine
  modified_base 16: mod_base = OTHER; note = 2'O-methyl guanosine
  modified_base 17: mod_base = OTHER; note = 2'-fluoro guanosine
  modified_base 18: mod_base = OTHER; note = 2'O-methyl adenosine
  modified_base 19: mod_base = OTHER; note = 2'-fluoro adenosine
  modified_base 20: mod_base = OTHER; note = 2'O-methyl adenosine phosphorothioate
  modified_base 21: mod_base = OTHER; note = 2'-fluoro adenosine
cagagtgtctgatggggaaaa

SEQ ID NO: 1210 - RNA, 21 nt, synthetic construct
  source 1..21: mol_type = other RNA
  modified_base 1: mod_base = OTHER; note = 2'-fluoro adenosine phosphorothioate
  modified_base 2: mod_base = OTHER; note = 2'O-methyl guanosine phosphorothioate
  modified_base 3: mod_base = OTHER; note = 2'-fluoro adenosine
  modified_base 4: mod_base = OTHER; note = 2'O-methyl guanosine
  modified_base 5: mod_base = OTHER; note = 2'-fluoro uridine
  modified_base 6: mod_base = OTHER; note = 2'O-methyl guanosine
  modified_base 7: mod_base = OTHER; note = 2'-fluoro uridine
  modified_base 8: mod_base = OTHER; note = 2'O-methyl cytidine
  modified_base 9: mod_base = OTHER; note = 2'-fluoro uridine
  modified_base 10: mod_base = OTHER; note = 2'O-methyl guanosine
  modified_base 11: mod_base = OTHER; note = 2'-fluoro adenosine
  modified_base 12: mod_base = OTHER; note = 2'O-methyl uridine
  modified_base 13: mod_base = OTHER; note = 2'-fluoro guanosine
  modified_base 14: mod_base = OTHER; note = 2'O-methyl guanosine
  modified_base 15: mod_base = OTHER; note = 2'-fluoro guanosine
  modified_base 16: mod_base = OTHER; note = 2'O-methyl guanosine
  modified_base 17: mod_base = OTHER; note = 2'-fluoro adenosine
  modified_base 18: mod_base = OTHER; note = 2'O-methyl adenosine
  modified_base 19: mod_base = OTHER; note = 2'-fluoro adenosine
  modified_base 20: mod_base = OTHER; note = 2'O-methyl adenosine phosphorothioate
  modified_base 21: mod_base = OTHER; note = 2'-fluoro cytidine
agagtgtctgatggggaaaac

SEQ ID NO: 1211 - RNA, 21 nt, synthetic construct
  source 1..21: mol_type = other RNA
  modified_base 1: mod_base = OTHER; note = 2'-fluoro guanosine phosphorothioate
  modified_base 2: mod_base = OTHER; note = 2'O-methyl adenosine phosphorothioate
  modified_base 3: mod_base = OTHER; note = 2'-fluoro guanosine
  modified_base 4: mod_base = OTHER; note = 2'O-methyl uridine
  modified_base 5: mod_base = OTHER; note = 2'-fluoro guanosine
  modified_base 6: mod_base = OTHER; note = 2'O-methyl uridine
  modified_base 7: mod_base = OTHER; note = 2'-fluoro cytidine
  modified_base 8: mod_base = OTHER; note = 2'O-methyl uridine
  modified_base 9: mod_base = OTHER; note = 2'-fluoro guanosine
  modified_base 10: mod_base = OTHER; note = 2'O-methyl adenosine
  modified_base 11: mod_base = OTHER; note = 2'-fluoro uridine
  modified_base 12: mod_base = OTHER; note = 2'O-methyl guanosine
  modified_base 13: mod_base = OTHER; note = 2'-fluoro guanosine
  modified_base 14: mod_base = OTHER; note = 2'O-methyl guanosine
  modified_base 15: mod_base = OTHER; note = 2'-fluoro guanosine
  modified_base 16: mod_base = OTHER; note = 2'O-methyl adenosine
  modified_base 17: mod_base = OTHER; note = 2'-fluoro adenosine
  modified_base 18: mod_base = OTHER; note = 2'O-methyl adenosine
  modified_base 19: mod_base = OTHER; note = 2'-fluoro adenosine
  modified_base 20: mod_base = OTHER; note = 2'O-methyl cytidine phosphorothioate
  modified_base 21: mod_base = OTHER; note = 2'-fluoro guanosine
gagtgtctgatggggaaaacg

SEQ ID NO: 1212 - RNA, 21 nt, synthetic construct
  source 1..21: mol_type = other RNA
  modified_base 1: mod_base = OTHER; note = 2'-fluoro adenosine phosphorothioate
  modified_base 2: mod_base = OTHER; note = 2'O-methyl guanosine phosphorothioate
  modified_base 3: mod_base = OTHER; note = 2'-fluoro uridine
  modified_base 4: mod_base = OTHER; note = 2'O-methyl guanosine
  modified_base 5: mod_base = OTHER; note = 2'-fluoro uridine
  modified_base 6: mod_base = OTHER; note = 2'O-methyl cytidine
  modified_base 7: mod_base = OTHER; note = 2'-fluoro uridine
  modified_base 8: mod_base = OTHER; note = 2'O-methyl guanosine
  modified_base 9: mod_base = OTHER; note = 2'-fluoro adenosine
  modified_base 10: mod_base = OTHER; note = 2'O-methyl uridine
  modified_base 11: mod_base = OTHER; note = 2'-fluoro guanosine
  modified_base 12: mod_base = OTHER; note = 2'O-methyl guanosine
  modified_base 13: mod_base = OTHER; note = 2'-fluoro guanosine
  modified_base 14: mod_base = OTHER; note = 2'O-methyl guanosine
  modified_base 15: mod_base = OTHER; note = 2'-fluoro adenosine
  modified_base 16: mod_base = OTHER; note = 2'O-methyl adenosine
  modified_base 17: mod_base = OTHER; note = 2'-fluoro adenosine
  modified_base 18: mod_base = OTHER; note = 2'O-methyl adenosine
  modified_base 19: mod_base = OTHER; note = 2'-fluoro cytidine
  modified_base 20: mod_base = OTHER; note = 2'O-methyl guanosine phosphorothioate
  modified_base 21: mod_base = OTHER; note = 2'-fluoro uridine
agtgtctgatggggaaaacgt

SEQ ID NO: 1213 - RNA, 21 nt, synthetic construct
  source 1..21: mol_type = other RNA
  modified_base 1: mod_base = OTHER; note = 2'-fluoro guanosine phosphorothioate
  modified_base 2: mod_base = OTHER; note = 2'O-methyl uridine phosphorothioate
  modified_base 3: mod_base = OTHER; note = 2'-fluoro guanosine
  modified_base 4: mod_base = OTHER; note = 2'O-methyl uridine
  modified_base 5: mod_base = OTHER; note = 2'-fluoro cytidine
  modified_base 6: mod_base = OTHER; note = 2'O-methyl uridine
  modified_base 7: mod_base = OTHER; note = 2'-fluoro guanosine
  modified_base 8: mod_base = OTHER; note = 2'O-methyl adenosine
  modified_base 9: mod_base = OTHER; note = 2'-fluoro uridine
  modified_base 10: mod_base = OTHER; note = 2'O-methyl guanosine
  modified_base 11: mod_base = OTHER; note = 2'-fluoro guanosine
  modified_base 12: mod_base = OTHER; note = 2'O-methyl guanosine
  modified_base 13: mod_base = OTHER; note = 2'-fluoro guanosine
  modified_base 14: mod_base = OTHER; note = 2'O-methyl adenosine
  modified_base 15: mod_base = OTHER; note = 2'-fluoro adenosine
  modified_base 16: mod_base = OTHER; note = 2'O-methyl adenosine
  modified_base 17: mod_base = OTHER; note = 2'-fluoro adenosine
  modified_base 18: mod_base = OTHER; note = 2'O-methyl cytidine
  modified_base 19: mod_base = OTHER; note = 2'-fluoro guanosine
  modified_base 20: mod_base = OTHER; note = 2'O-methyl uridine phosphorothioate
  modified_base 21: mod_base = OTHER; note = 2'-fluoro uridine
gtgtctgatggggaaaacgtt

SEQ ID NO: 1214 - RNA, 21 nt, synthetic construct
  source 1..21: mol_type = other RNA
  modified_base 1: mod_base = OTHER; note = 2'-fluoro uridine phosphorothioate
  modified_base 2: mod_base = OTHER; note = 2'O-methyl guanosine phosphorothioate
  modified_base 3: mod_base = OTHER; note = 2'-fluoro uridine
  modified_base 4: mod_base = OTHER; note = 2'O-methyl cytidine
  modified_base 5: mod_base = OTHER; note = 2'-fluoro uridine
  modified_base 6: mod_base = OTHER; note = 2'O-methyl guanosine
  modified_base 7: mod_base = OTHER; note = 2'-fluoro adenosine
  modified_base 8: mod_base = OTHER; note = 2'O-methyl uridine
  modified_base 9: mod_base = OTHER; note = 2'-fluoro guanosine
  modified_base 10: mod_base = OTHER; note = 2'O-methyl guanosine
  modified_base 11: mod_base = OTHER; note = 2'-fluoro guanosine
  modified_base 12: mod_base = OTHER; note = 2'O-methyl guanosine
  modified_base 13: mod_base = OTHER; note = 2'-fluoro adenosine
  modified_base 14: mod_base = OTHER; note = 2'O-methyl adenosine
  modified_base 15: mod_base = OTHER; note = 2'-fluoro adenosine
  modified_base 16: mod_base = OTHER; note = 2'O-methyl adenosine
  modified_base 17: mod_base = OTHER; note = 2'-fluoro cytidine
  modified_base 18: mod_base = OTHER; note = 2'O-methyl guanosine
  modified_base 19: mod_base = OTHER; note = 2'-fluoro uridine
  modified_base 20: mod_base = OTHER; note = 2'O-methyl uridine phosphorothioate
  modified_base 21: mod_base = OTHER; note = 2'-fluoro cytidine
tgtctgatggggaaaacgttc

SEQ ID NO: 1215 - RNA, 21 nt, synthetic construct
  source 1..21: mol_type = other RNA
  modified_base 1: mod_base = OTHER; note = 2'-fluoro guanosine phosphorothioate
  modified_base 2: mod_base = OTHER; note = 2'O-methyl uridine phosphorothioate
  modified_base 3: mod_base = OTHER; note = 2'-fluoro cytidine
  modified_base 4: mod_base = OTHER; note = 2'O-methyl uridine
  modified_base 5: mod_base = OTHER; note = 2'-fluoro guanosine
  modified_base 6: mod_base = OTHER; note = 2'O-methyl adenosine
  modified_base 7: mod_base = OTHER; note = 2'-fluoro uridine
  modified_base 8: mod_base = OTHER; note = 2'O-methyl guanosine
  modified_base 9: mod_base = OTHER; note = 2'-fluoro guanosine
  modified_base 10: mod_base = OTHER; note = 2'O-methyl guanosine
  modified_base 11: mod_base = OTHER; note = 2'-fluoro guanosine
  modified_base 12: mod_base = OTHER; note = 2'O-methyl adenosine
  modified_base 13: mod_base = OTHER; note = 2'-fluoro adenosine
  modified_base 14: mod_base = OTHER; note = 2'O-methyl adenosine
  modified_base 15: mod_base = OTHER; note = 2'-fluoro adenosine
  modified_base 16: mod_base = OTHER; note = 2'O-methyl cytidine
  modified_base 17: mod_base = OTHER; note = 2'-fluoro guanosine
  modified_base 18: mod_base = OTHER; note = 2'O-methyl uridine
  modified_base 19: mod_base = OTHER; note = 2'-fluoro uridine
  modified_base 20: mod_base = OTHER; note = 2'O-methyl cytidine phosphorothioate
  modified_base 21: mod_base = OTHER; note = 2'-fluoro uridine
gtctgatggggaaaacgttct

SEQ ID NO: 1216 - RNA, 21 nt, synthetic construct
  source 1..21: mol_type = other RNA
  modified_base 1: mod_base = OTHER; note = 2'-fluoro uridine phosphorothioate
  modified_base 2: mod_base = OTHER; note = 2'O-methyl cytidine phosphorothioate
  modified_base 3: mod_base = OTHER; note = 2'-fluoro uridine
  modified_base 4: mod_base = OTHER; note = 2'O-methyl guanosine
  modified_base 5: mod_base = OTHER; note = 2'-fluoro adenosine
  modified_base 6: mod_base = OTHER; note = 2'O-methyl uridine
  modified_base 7: mod_base = OTHER; note = 2'-fluoro guanosine
  modified_base 8: mod_base = OTHER; note = 2'O-methyl guanosine
  modified_base 9: mod_base = OTHER; note = 2'-fluoro guanosine
  modified_base 10: mod_base = OTHER; note = 2'O-methyl guanosine
  modified_base 11: mod_base = OTHER; note = 2'-fluoro adenosine
  modified_base 12: mod_base = OTHER; note = 2'O-methyl adenosine
  modified_base 13: mod_base = OTHER; note = 2'-fluoro adenosine
  modified_base 14: mod_base = OTHER; note = 2'O-methyl adenosine
  modified_base 15: mod_base = OTHER; note = 2'-fluoro cytidine
  modified_base 16: mod_base = OTHER; note = 2'O-methyl guanosine
  modified_base 17: mod_base = OTHER; note = 2'-fluoro uridine
  modified_base 18: mod_base = OTHER; note = 2'O-methyl uridine
  modified_base 19: mod_base = OTHER; note = 2'-fluoro cytidine
  modified_base 20: mod_base = OTHER; note = 2'O-methyl uridine phosphorothioate
  modified_base 21: mod_base = OTHER; note = 2'-fluoro guanosine
tctgatggggaaaacgttctg

SEQ ID NO: 1217 - RNA, 21 nt, synthetic construct
  source 1..21: mol_type = other RNA
  modified_base 1: mod_base = OTHER; note = 2'-fluoro cytidine phosphorothioate
  modified_base 2: mod_base = OTHER; note = 2'O-methyl uridine phosphorothioate
  modified_base 3: mod_base = OTHER; note = 2'-fluoro guanosine
  modified_base 4: mod_base = OTHER; note = 2'O-methyl adenosine
  modified_base 5: mod_base = OTHER; note = 2'-fluoro uridine
  modified_base 6: mod_base = OTHER; note = 2'O-methyl guanosine
  modified_base 7: mod_base = OTHER; note = 2'-fluoro guanosine
  modified_base 8: mod_base = OTHER; note = 2'O-methyl guanosine
  modified_base 9: mod_base = OTHER; note = 2'-fluoro guanosine
  modified_base 10: mod_base = OTHER; note = 2'O-methyl adenosine
  modified_base 11: mod_base = OTHER; note = 2'-fluoro adenosine
  modified_base 12: mod_base = OTHER; note = 2'O-methyl adenosine
  modified_base 13: mod_base = OTHER; note = 2'-fluoro adenosine
  modified_base 14: mod_base = OTHER; note = 2'O-methyl cytidine
  modified_base 15: mod_base = OTHER; note = 2'-fluoro guanosine
  modified_base 16: mod_base = OTHER; note = 2'O-methyl uridine
  modified_base 17: mod_base = OTHER; note = 2'-fluoro uridine
  modified_base 18: mod_base = OTHER; note = 2'O-methyl cytidine
  modified_base 19: mod_base = OTHER; note = 2'-fluoro uridine
  modified_base 20: mod_base = OTHER; note = 2'O-methyl guanosine phosphorothioate
  modified_base 21: mod_base = OTHER; note = 2'-fluoro guanosine
ctgatggggaaaacgttctgg

SEQ ID NO: 1218 - RNA, 21 nt, synthetic construct
  source 1..21: mol_type = other RNA
  modified_base 1: mod_base = OTHER; note = 2'-fluoro uridine phosphorothioate
  modified_base 2: mod_base = OTHER; note = 2'O-methyl guanosine phosphorothioate
  modified_base 3: mod_base = OTHER; note = 2'-fluoro adenosine
  modified_base 4: mod_base = OTHER; note = 2'O-methyl uridine
  modified_base 5: mod_base = OTHER; note = 2'-fluoro guanosine
  modified_base 6: mod_base = OTHER; note = 2'O-methyl guanosine
  modified_base 7: mod_base = OTHER; note = 2'-fluoro guanosine
  modified_base 8: mod_base = OTHER; note = 2'O-methyl guanosine
  modified_base 9: mod_base = OTHER; note = 2'-fluoro adenosine
  modified_base 10: mod_base = OTHER; note = 2'O-methyl adenosine
  modified_base 11: mod_base = OTHER; note = 2'-fluoro adenosine
  modified_base 12: mod_base = OTHER; note = 2'O-methyl adenosine
  modified_base 13: mod_base = OTHER; note = 2'-fluoro cytidine
  modified_base 14: mod_base = OTHER; note = 2'O-methyl guanosine
  modified_base 15: mod_base = OTHER; note = 2'-fluoro uridine
  modified_base 16: mod_base = OTHER; note = 2'O-methyl uridine
  modified_base 17: mod_base = OTHER; note = 2'-fluoro cytidine
  modified_base 18: mod_base = OTHER; note = 2'O-methyl uridine
  modified_base 19: mod_base = OTHER; note = 2'-fluoro guanosine
  modified_base 20: mod_base = OTHER; note = 2'O-methyl guanosine phosphorothioate
  modified_base 21: mod_base = OTHER; note = 2'-fluoro uridine
tgatggggaaaacgttctggt

SEQ ID NO: 1219 - RNA, 21 nt, synthetic construct
  source 1..21: mol_type = other RNA
  modified_base 1: mod_base = OTHER; note = 2'-fluoro guanosine phosphorothioate
  modified_base 2: mod_base = OTHER; note = 2'O-methyl adenosine phosphorothioate
  modified_base 3: mod_base = OTHER; note = 2'-fluoro uridine
  modified_base 4: mod_base = OTHER; note = 2'O-methyl guanosine
  modified_base 5: mod_base = OTHER; note = 2'-fluoro guanosine
  modified_base 6: mod_base = OTHER; note = 2'O-methyl guanosine
  modified_base 7: mod_base = OTHER; note = 2'-fluoro guanosine
  modified_base 8: mod_base = OTHER; note = 2'O-methyl adenosine
  modified_base 9: mod_base = OTHER; note = 2'-fluoro adenosine
  modified_base 10: mod_base = OTHER; note = 2'O-methyl adenosine
  modified_base 11: mod_base = OTHER; note = 2'-fluoro adenosine
  modified_base 12: mod_base = OTHER; note = 2'O-methyl cytidine
  modified_base 13: mod_base = OTHER; note = 2'-fluoro guanosine
  modified_base 14: mod_base = OTHER; note = 2'O-methyl uridine
  modified_base 15: mod_base = OTHER; note = 2'-fluoro uridine
  modified_base 16: mod_base = OTHER; note = 2'O-methyl cytidine
  modified_base 17: mod_base = OTHER; note = 2'-fluoro uridine
  modified_base 18: mod_base = OTHER; note = 2'O-methyl guanosine
  modified_base 19: mod_base = OTHER; note = 2'-fluoro guanosine
  modified_base 20: mod_base = OTHER; note = 2'O-methyl uridine phosphorothioate
  modified_base 21: mod_base = OTHER; note = 2'-fluoro guanosine
gatggggaaaacgttctggtg

SEQ ID NO: 1220 - RNA, 21 nt, synthetic construct
  source 1..21: mol_type = other RNA
  modified_base 1: mod_base = OTHER; note = 2'-fluoro uridine phosphorothioate
  modified_base 2: mod_base = OTHER; note = 2'O-methyl guanosine phosphorothioate
  modified_base 3: mod_base = OTHER; note = 2'-fluoro guanosine
  modified_base 4: mod_base = OTHER; note = 2'O-methyl guanosine
  modified_base 5: mod_base = OTHER; note = 2'-fluoro guanosine
  modified_base 6: mod_base = OTHER; note = 2'O-methyl adenosine
  modified_base 7: mod_base = OTHER; note = 2'-fluoro adenosine
  modified_base 8: mod_base = OTHER; note = 2'O-methyl adenosine
  modified_base 9: mod_base = OTHER; note = 2'-fluoro adenosine
  modified_base 10: mod_base = OTHER; note = 2'O-methyl cytidine
  modified_base 11: mod_base = OTHER; note = 2'-fluoro guanosine
  modified_base 12: mod_base = OTHER; note = 2'O-methyl uridine
  modified_base 13: mod_base = OTHER; note = 2'-fluoro uridine
  modified_base 14: mod_base = OTHER; note = 2'O-methyl cytidine
  modified_base 15: mod_base = OTHER; note = 2'-fluoro uridine
  modified_base 16: mod_base = OTHER; note = 2'O-methyl guanosine
  modified_base 17: mod_base = OTHER; note = 2'-fluoro guanosine
  modified_base 18: mod_base = OTHER; note = 2'O-methyl uridine
  modified_base 19: mod_base = OTHER; note = 2'-fluoro guanosine
  modified_base 20: mod_base = OTHER; note = 2'O-methyl uridine phosphorothioate
  modified_base 21: mod_base = OTHER; note = 2'-fluoro cytidine
tggggaaaacgttctggtgtc

SEQ ID NO: 1221 - RNA, 21 nt, synthetic construct
  source 1..21: mol_type = other RNA
  modified_base 1: mod_base = OTHER; note = 2'-fluoro guanosine phosphorothioate
  modified_base 2: mod_base = OTHER; note = 2'O-methyl guanosine phosphorothioate
  modified_base 3: mod_base = OTHER; note = 2'-fluoro guanosine
  modified_base 4: mod_base = OTHER; note = 2'O-methyl adenosine
  modified_base 5: mod_base = OTHER; note = 2'-fluoro adenosine
  modified_base 6: mod_base = OTHER; note = 2'O-methyl adenosine
  modified_base 7: mod_base = OTHER; note = 2'-fluoro adenosine
  modified_base 8: mod_base = OTHER; note = 2'O-methyl cytidine
  modified_base 9: mod_base = OTHER; note = 2'-fluoro guanosine
  modified_base 10: mod_base = OTHER; note = 2'O-methyl uridine
  modified_base 11: mod_base = OTHER; note = 2'-fluoro uridine
  modified_base 12: mod_base = OTHER; note = 2'O-methyl cytidine
  modified_base 13: mod_base = OTHER; note = 2'-fluoro uridine
  modified_base 14: mod_base = OTHER; note = 2'O-methyl guanosine
  modified_base 15: mod_base = OTHER; note = 2'-fluoro guanosine
  modified_base 16: mod_base = OTHER; note = 2'O-methyl uridine
  modified_base 17: mod_base = OTHER; note = 2'-fluoro guanosine
  modified_base 18: mod_base = OTHER; note = 2'O-methyl uridine
  modified_base 19: mod_base = OTHER; note = 2'-fluoro cytidine
  modified_base 20: mod_base = OTHER; note = 2'O-methyl uridine phosphorothioate
  modified_base 21: mod_base = OTHER; note = 2'-fluoro guanosine
gggaaaacgttctggtgtctg

SEQ ID NO: 1222 - RNA, 21 nt, synthetic construct
  source 1..21: mol_type = other RNA
  modified_base 1: mod_base = OTHER; note = 2'-fluoro guanosine phosphorothioate
  modified_base 2: mod_base = OTHER; note = 2'O-methyl guanosine phosphorothioate
  modified_base 3: mod_base = OTHER; note = 2'-fluoro adenosine
  modified_base 4: mod_base = OTHER; note = 2'O-methyl adenosine
  modified_base 5: mod_base = OTHER; note = 2'-fluoro adenosine
  modified_base 6: mod_base = OTHER; note = 2'O-methyl adenosine
  modified_base 7: mod_base = OTHER; note = 2'-fluoro cytidine
  modified_base 8: mod_base = OTHER; note = 2'O-methyl guanosine
  modified_base 9: mod_base = OTHER; note = 2'-fluoro uridine
  modified_base 10: mod_base = OTHER; note = 2'O-methyl uridine
  modified_base 11: mod_base = OTHER; note = 2'-fluoro cytidine
  modified_base 12: mod_base = OTHER; note = 2'O-methyl uridine
  modified_base 13: mod_base = OTHER; note = 2'-fluoro guanosine
  modified_base 14: mod_base = OTHER; note = 2'O-methyl guanosine
  modified_base 15: mod_base = OTHER; note = 2'-fluoro uridine
  modified_base 16: mod_base = OTHER; note = 2'O-methyl guanosine
  modified_base 17: mod_base = OTHER; note = 2'-fluoro uridine
  modified_base 18: mod_base = OTHER; note = 2'O-methyl cytidine
  modified_base 19: mod_base = OTHER; note = 2'-fluoro uridine
  modified_base 20: mod_base = OTHER; note = 2'O-methyl guanosine phosphorothioate
  modified_base 21: mod_base = OTHER; note = 2'-fluoro adenosine
ggaaaacgttctggtgtctga

SEQ ID NO: 1223 - RNA, 21 nt, synthetic construct
  source 1..21: mol_type = other RNA
  modified_base 1: mod_base = OTHER; note = 2'-fluoro adenosine phosphorothioate
  modified_base 2: mod_base = OTHER; note = 2'O-methyl adenosine phosphorothioate
  modified_base 3: mod_base = OTHER; note = 2'-fluoro adenosine
  modified_base 4: mod_base = OTHER; note = 2'O-methyl cytidine
  modified_base 5: mod_base = OTHER; note = 2'-fluoro guanosine
  modified_base 6: mod_base = OTHER; note = 2'O-methyl uridine
  modified_base 7: mod_base = OTHER; note = 2'-fluoro uridine
  modified_base 8: mod_base = OTHER; note = 2'O-methyl cytidine
  modified_base 9: mod_base = OTHER; note = 2'-fluoro uridine
  modified_base 10: mod_base = OTHER; note = 2'O-methyl guanosine
  modified_base 11: mod_base = OTHER; note = 2'-fluoro guanosine
  modified_base 12: mod_base = OTHER; note = 2'O-methyl uridine
  modified_base 13: mod_base = OTHER; note = 2'-fluoro guanosine
  modified_base 14: mod_base = OTHER; note = 2'O-methyl uridine
  modified_base 15: mod_base = OTHER; note = 2'-fluoro cytidine
  modified_base 16: mod_base = OTHER; note = 2'O-methyl uridine
  modified_base 17: mod_base = OTHER; note = 2'-fluoro guanosine
  modified_base 18: mod_base = OTHER; note = 2'O-methyl adenosine
  modified_base 19: mod_base = OTHER; note = 2'-fluoro cytidine
  modified_base 20: mod_base = OTHER; note = 2'O-methyl uridine phosphorothioate
  modified_base 21: mod_base = OTHER; note = 2'-fluoro uridine
aaacgttctggtgtctgactt

SEQ ID NO: 1224 - RNA, 21 nt, synthetic construct
  source 1..21: mol_type = other RNA
  modified_base 1: mod_base = OTHER; note = 2'-fluoro adenosine phosphorothioate
  modified_base 2: mod_base = OTHER; note = 2'O-methyl adenosine phosphorothioate
  modified_base 3: mod_base = OTHER; note = 2'-fluoro cytidine
  modified_base 4: mod_base = OTHER; note = 2'O-methyl guanosine
  modified_base 5: mod_base = OTHER; note = 2'-fluoro uridine
  modified_base 6: mod_base = OTHER; note = 2'O-methyl uridine
  modified_base 7: mod_base = OTHER; note = 2'-fluoro cytidine
  modified_base 8: mod_base = OTHER; note = 2'O-methyl uridine
  modified_base 9: mod_base = OTHER; note = 2'-fluoro guanosine
  modified_base 10: mod_base = OTHER; note = 2'O-methyl guanosine
  modified_base 11: mod_base = OTHER; note = 2'-fluoro uridine
  modified_base 12: mod_base = OTHER; note = 2'O-methyl guanosine
  modified_base 13: mod_base = OTHER; note = 2'-fluoro uridine
  modified_base 14: mod_base = OTHER; note = 2'O-methyl cytidine
  modified_base 15: mod_base = OTHER; note = 2'-fluoro uridine
  modified_base 16: mod_base = OTHER; note = 2'O-methyl guanosine
  modified_base 17: mod_base = OTHER; note = 2'-fluoro adenosine
  modified_base 18: mod_base = OTHER; note = 2'O-methyl cytidine
  modified_base 19: mod_base = OTHER; note = 2'-fluoro uridine
  modified_base 20: mod_base = OTHER; note = 2'O-methyl uridine phosphorothioate
  modified_base 21: mod_base = OTHER; note = 2'-fluoro uridine
aacgttctggtgtctgacttt

SEQ ID NO: 1225 - RNA, 21 nt, synthetic construct
  source 1..21: mol_type = other RNA
  modified_base 1: mod_base = OTHER; note = 2'-fluoro adenosine phosphorothioate
  modified_base 2: mod_base = OTHER; note = 2'O-methyl cytidine phosphorothioate
  modified_base 3: mod_base = OTHER; note = 2'-fluoro guanosine
  modified_base 4: mod_base = OTHER; note = 2'O-methyl uridine
  modified_base 5: mod_base = OTHER; note = 2'-fluoro uridine
  modified_base 6: mod_base = OTHER; note = 2'O-methyl cytidine
  modified_base 7: mod_base = OTHER; note = 2'-fluoro uridine
  modified_base 8: mod_base = OTHER; note = 2'O-methyl guanosine
  modified_base 9: mod_base = OTHER; note = 2'-fluoro guanosine
  modified_base 10: mod_base = OTHER; note = 2'O-methyl uridine
  modified_base 11: mod_base = OTHER; note = 2'-fluoro guanosine
  modified_base 12: mod_base = OTHER; note = 2'O-methyl uridine
  modified_base 13: mod_base = OTHER; note = 2'-fluoro cytidine
  modified_base 14: mod_base = OTHER; note = 2'O-methyl uridine
  modified_base 15: mod_base = OTHER; note = 2'-fluoro guanosine
  modified_base 16: mod_base = OTHER; note = 2'O-methyl adenosine
  modified_base 17: mod_base = OTHER; note = 2'-fluoro cytidine
  modified_base 18: mod_base = OTHER; note = 2'O-methyl uridine
  modified_base 19: mod_base = OTHER; note = 2'-fluoro uridine
  modified_base 20: mod_base = OTHER; note = 2'O-methyl uridine phosphorothioate
  modified_base 21: mod_base = OTHER; note = 2'-fluoro cytidine
acgttctggtgtctgactttc

SEQ ID NO: 1226 - RNA, 21 nt, synthetic construct
  source 1..21: mol_type = other RNA
  modified_base 1: mod_base = OTHER; note = 2'-fluoro cytidine phosphorothioate
  modified_base 2: mod_base = OTHER; note = 2'O-methyl guanosine phosphorothioate
  modified_base 3: mod_base = OTHER; note = 2'-fluoro uridine
  modified_base 4: mod_base = OTHER; note = 2'O-methyl uridine
  modified_base 5: mod_base = OTHER; note = 2'-fluoro cytidine
  modified_base 6: mod_base = OTHER; note = 2'O-methyl uridine
  modified_base 7: mod_base = OTHER; note = 2'-fluoro guanosine
  modified_base 8: mod_base = OTHER; note = 2'O-methyl guanosine
  modified_base 9: mod_base = OTHER; note = 2'-fluoro uridine
  modified_base 10: mod_base = OTHER; note = 2'O-methyl guanosine
  modified_base 11: mod_base = OTHER; note = 2'-fluoro uridine
  modified_base 12: mod_base = OTHER; note = 2'O-methyl cytidine
  modified_base 13: mod_base = OTHER; note = 2'-fluoro uridine
  modified_base 14: mod_base = OTHER; note = 2'O-methyl guanosine
  modified_base 15: mod_base = OTHER; note = 2'-fluoro adenosine
  modified_base 16: mod_base = OTHER; note = 2'O-methyl cytidine
  modified_base 17: mod_base = OTHER; note = 2'-fluoro uridine
  modified_base 18: mod_base = OTHER; note = 2'O-methyl uridine
  modified_base 19: mod_base = OTHER; note = 2'-fluoro uridine
  modified_base 20: mod_base = OTHER; note = 2'O-methyl cytidine phosphorothioate
  modified_base 21: mod_base = OTHER; note = 2'-fluoro guanosine
cgttctggtgtctgactttcg

SEQ ID NO: 1227 - RNA, 21 nt, synthetic construct
  source 1..21: mol_type = other RNA
  modified_base 1: mod_base = OTHER; note = 2'-fluoro cytidine phosphorothioate
  modified_base 2: mod_base = OTHER; note = 2'O-methyl uridine phosphorothioate
  modified_base 3: mod_base = OTHER; note = 2'-fluoro guanosine
  modified_base 4: mod_base = OTHER; note = 2'O-methyl guanosine
  modified_base 5: mod_base = OTHER; note = 2'-fluoro uridine
  modified_base 6: mod_base = OTHER; note = 2'O-methyl guanosine
  modified_base 7: mod_base = OTHER; note = 2'-fluoro uridine
  modified_base 8: mod_base = OTHER; note = 2'O-methyl cytidine
  modified_base 9: mod_base = OTHER; note = 2'-fluoro uridine
  modified_base 10: mod_base = OTHER; note = 2'O-methyl guanosine
  modified_base 11: mod_base = OTHER; note = 2'-fluoro adenosine
  modified_base 12: mod_base = OTHER; note = 2'O-methyl cytidine
  modified_base 13: mod_base = OTHER; note = 2'-fluoro uridine
  modified_base 14: mod_base = OTHER; note = 2'O-methyl uridine
  modified_base 15: mod_base = OTHER; note = 2'-fluoro uridine
  modified_base 16: mod_base = OTHER; note = 2'O-methyl cytidine
  modified_base 17: mod_base = OTHER; note = 2'-fluoro guanosine
  modified_base 18: mod_base = OTHER; note = 2'O-methyl guanosine
  modified_base 19: mod_base = OTHER; note = 2'-fluoro uridine
  modified_base 20: mod_base = OTHER; note = 2'O-methyl cytidine phosphorothioate
  modified_base 21: mod_base = OTHER; note = 2'-fluoro cytidine
ctggtgtctgactttcggtcc

SEQ ID NO: 1228 - RNA, 21 nt, synthetic construct
  source 1..21: mol_type = other RNA
  modified_base 1: mod_base = OTHER; note = 2'-fluoro uridine phosphorothioate
  modified_base 2: mod_base = OTHER; note = 2'O-methyl guanosine phosphorothioate
  modified_base 3: mod_base = OTHER; note = 2'-fluoro guanosine
  modified_base 4: mod_base = OTHER; note = 2'O-methyl uridine
  modified_base 5: mod_base = OTHER; note = 2'-fluoro guanosine
  modified_base 6: mod_base = OTHER; note = 2'O-methyl uridine
  modified_base 7: mod_base = OTHER; note = 2'-fluoro cytidine
  modified_base 8: mod_base = OTHER; note = 2'O-methyl uridine
  modified_base 9: mod_base = OTHER; note = 2'-fluoro guanosine
  modified_base 10: mod_base = OTHER; note = 2'O-methyl adenosine
  modified_base 11: mod_base = OTHER; note = 2'-fluoro cytidine
  modified_base 12: mod_base = OTHER; note = 2'O-methyl uridine
  modified_base 13: mod_base = OTHER; note = 2'-fluoro uridine
  modified_base 14: mod_base = OTHER; note = 2'O-methyl uridine
  modified_base 15: mod_base = OTHER; note = 2'-fluoro cytidine
  modified_base 16: mod_base = OTHER; note = 2'O-methyl guanosine
  modified_base 17: mod_base = OTHER; note = 2'-fluoro guanosine
  modified_base 18: mod_base = OTHER; note = 2'O-methyl uridine
  modified_base 19: mod_base = OTHER; note = 2'-fluoro cytidine
  modified_base 20: mod_base = OTHER; note = 2'O-methyl cytidine phosphorothioate
  modified_base 21: mod_base = OTHER; note = 2'-fluoro adenosine
tggtgtctgactttcggtcca

SEQ ID NO: 1229 - RNA, 21 nt, synthetic construct
  source 1..21: mol_type = other RNA
  modified_base 1: mod_base = OTHER; note = 2'-fluoro guanosine phosphorothioate
  modified_base 2: mod_base = OTHER; note = 2'O-methyl guanosine phosphorothioate
  modified_base 3: mod_base = OTHER; note = 2'-fluoro uridine
  modified_base 4: mod_base = OTHER; note = 2'O-methyl guanosine
  modified_base 5: mod_base = OTHER; note = 2'-fluoro uridine
  modified_base 6: mod_base = OTHER; note = 2'O-methyl cytidine
  modified_base 7: mod_base = OTHER; note = 2'-fluoro uridine
  modified_base 8: mod_base = OTHER; note = 2'O-methyl guanosine
  modified_base 9: mod_base = OTHER; note = 2'-fluoro adenosine
  modified_base 10: mod_base = OTHER; note = 2'O-methyl cytidine
  modified_base 11: mod_base = OTHER; note = 2'-fluoro uridine
  modified_base 12: mod_base = OTHER; note = 2'O-methyl uridine
  modified_base 13: mod_base = OTHER; note = 2'-fluoro uridine
  modified_base 14: mod_base = OTHER; note = 2'O-methyl cytidine
  modified_base 15: mod_base = OTHER; note = 2'-fluoro guanosine
  modified_base 16: mod_base = OTHER; note = 2'O-methyl guanosine
  modified_base 17: mod_base = OTHER; note = 2'-fluoro uridine
  modified_base 18: mod_base = OTHER; note = 2'O-methyl cytidine
  modified_base 19: mod_base = OTHER; note = 2'-fluoro cytidine
  modified_base 20: mod_base = OTHER; note = 2'O-methyl adenosine phosphorothioate
  modified_base 21: mod_base = OTHER; note = 2'-fluoro adenosine
ggtgtctgactttcggtccaa

SEQ ID NO: 1230 - RNA, 21 nt, synthetic construct
  source 1..21: mol_type = other RNA
  modified_base 1: mod_base = OTHER; note = 2'-fluoro guanosine phosphorothioate
  modified_base 2: mod_base = OTHER; note = 2'O-methyl uridine phosphorothioate
  modified_base 3: mod_base = OTHER; note = 2'-fluoro guanosine
  modified_base 4: mod_base = OTHER; note = 2'O-methyl uridine
  modified_base 5: mod_base = OTHER; note = 2'-fluoro cytidine
  modified_base 6: mod_base = OTHER; note = 2'O-methyl uridine
  modified_base 7: mod_base = OTHER; note = 2'-fluoro guanosine
  modified_base 8: mod_base = OTHER; note = 2'O-methyl adenosine
  modified_base 9: mod_base = OTHER; note = 2'-fluoro cytidine
  modified_base 10: mod_base = OTHER; note = 2'O-methyl uridine
  modified_base 11: mod_base = OTHER; note = 2'-fluoro uridine
  modified_base 12: mod_base = OTHER; note = 2'O-methyl uridine
  modified_base 13: mod_base = OTHER; note = 2'-fluoro cytidine
  modified_base 14: mod_base = OTHER; note = 2'O-methyl guanosine
  modified_base 15: mod_base = OTHER; note = 2'-fluoro guanosine
  modified_base 16: mod_base = OTHER; note = 2'O-methyl uridine
  modified_base 17: mod_base = OTHER; note = 2'-fluoro cytidine
  modified_base 18: mod_base = OTHER; note = 2'O-methyl cytidine
  modified_base 19: mod_base = OTHER; note = 2'-fluoro adenosine
  modified_base 20: mod_base = OTHER; note = 2'O-methyl adenosine phosphorothioate
  modified_base 21: mod_base = OTHER; note = 2'-fluoro adenosine
gtgtctgactttcggtccaaa

SEQ ID NO: 1231 - RNA, 21 nt, synthetic construct
  source 1..21: mol_type = other RNA
  modified_base 1: mod_base = OTHER; note = 2'-fluoro guanosine phosphorothioate
  modified_base 2: mod_base = OTHER; note = 2'O-methyl uridine phosphorothioate
  modified_base 3: mod_base = OTHER; note = 2'-fluoro cytidine
  modified_base 4: mod_base = OTHER; note = 2'O-methyl uridine
  modified_base 5: mod_base = OTHER; note = 2'-fluoro guanosine
  modified_base 6: mod_base = OTHER; note = 2'O-methyl adenosine
  modified_base 7: mod_base = OTHER; note = 2'-fluoro cytidine
  modified_base 8: mod_base = OTHER; note = 2'O-methyl uridine
  modified_base 9: mod_base = OTHER; note = 2'-fluoro uridine
  modified_base 10: mod_base = OTHER; note = 2'O-methyl uridine
  modified_base 11: mod_base = OTHER; note = 2'-fluoro cytidine
  modified_base 12: mod_base = OTHER; note = 2'O-methyl guanosine
  modified_base 13: mod_base = OTHER; note = 2'-fluoro guanosine
  modified_base 14: mod_base = OTHER; note = 2'O-methyl uridine
  modified_base 15: mod_base = OTHER; note = 2'-fluoro cytidine
  modified_base 16: mod_base = OTHER; note = 2'O-methyl cytidine
  modified_base 17: mod_base = OTHER; note = 2'-fluoro adenosine
  modified_base 18: mod_base = OTHER; note = 2'O-methyl adenosine
  modified_base 19: mod_base = OTHER; note = 2'-fluoro adenosine
  modified_base 20: mod_base = OTHER; note = 2'O-methyl guanosine phosphorothioate
  modified_base 21: mod_base = OTHER; note = 2'-fluoro adenosine
gtctgactttcggtccaaaga

SEQ ID NO: 1232 - RNA, 21 nt, synthetic construct
  source 1..21: mol_type = other RNA
  modified_base 1: mod_base = OTHER; note = 2'-fluoro uridine phosphorothioate
  modified_base 2: mod_base = OTHER; note = 2'O-methyl cytidine phosphorothioate
  modified_base 3: mod_base = OTHER; note = 2'-fluoro uridine
  modified_base 4: mod_base = OTHER; note = 2'O-methyl guanosine
  modified_base 5: mod_base = OTHER; note = 2'-fluoro adenosine
  modified_base 6: mod_base = OTHER; note = 2'O-methyl cytidine
  modified_base 7: mod_base = OTHER; note = 2'-fluoro uridine
  modified_base 8: mod_base = OTHER; note = 2'O-methyl uridine
  modified_base 9: mod_base = OTHER; note = 2'-fluoro uridine
  modified_base 10: mod_base = OTHER; note = 2'O-methyl cytidine
  modified_base 11: mod_base = OTHER; note = 2'-fluoro guanosine
  modified_base 12: mod_base = OTHER; note = 2'O-methyl guanosine
  modified_base 13: mod_base = OTHER; note = 2'-fluoro uridine
  modified_base 14: mod_base = OTHER; note = 2'O-methyl cytidine
  modified_base 15: mod_base = OTHER; note = 2'-fluoro cytidine
  modified_base 16: mod_base = OTHER; note = 2'O-methyl adenosine
  modified_base 17: mod_base = OTHER; note = 2'-fluoro adenosine
  modified_base 18: mod_base = OTHER; note = 2'O-methyl adenosine
  modified_base 19: mod_base = OTHER; note = 2'-fluoro guanosine
  modified_base 20: mod_base = OTHER; note = 2'O-methyl adenosine phosphorothioate
  modified_base 21: mod_base = OTHER; note = 2'-fluoro cytidine
tctgactttcggtccaaagac

SEQ ID NO: 1233 - RNA, 21 nt, synthetic construct
  source 1..21: mol_type = other RNA
  modified_base 1: mod_base = OTHER; note = 2'-fluoro guanosine phosphorothioate
  modified_base 2: mod_base = OTHER; note = 2'O-methyl guanosine phosphorothioate
  modified_base 3: mod_base = OTHER; note = 2'-fluoro uridine
  modified_base 4: mod_base = OTHER; note = 2'O-methyl cytidine
  modified_base 5: mod_base = OTHER; note = 2'-fluoro cytidine
  modified_base 6: mod_base = OTHER; note = 2'O-methyl adenosine
  modified_base 7: mod_base = OTHER; note = 2'-fluoro adenosine
  modified_base 8: mod_base = OTHER; note = 2'O-methyl adenosine
  modified_base 9: mod_base = OTHER; note = 2'-fluoro guanosine
  modified_base 10: mod_base = OTHER; note = 2'O-methyl adenosine
  modified_base 11: mod_base = OTHER; note = 2'-fluoro cytidine
  modified_base 12: mod_base = OTHER; note = 2'O-methyl guanosine
  modified_base 13: mod_base = OTHER; note = 2'-fluoro adenosine
  modified_base 14: mod_base = OTHER; note = 2'O-methyl adenosine
  modified_base 15: mod_base = OTHER; note = 2'-fluoro guanosine
  modified_base 16: mod_base = OTHER; note = 2'O-methyl uridine
  modified_base 17: mod_base = OTHER; note = 2'-fluoro cytidine
  modified_base 18: mod_base = OTHER; note = 2'O-methyl guanosine
  modified_base 19: mod_base = OTHER; note = 2'-fluoro uridine
  modified_base 20: mod_base = OTHER; note = 2'O-methyl guanosine phosphorothioate
  modified_base 21: mod_base = OTHER; note = 2'-fluoro guanosine
ggtccaaagacgaagtcgtgg

SEQ ID NO: 1234 - RNA, 21 nt, synthetic construct
  source 1..21: mol_type = other RNA
  modified_base 1: mod_base = OTHER; note = 2'-fluoro guanosine phosphorothioate
  modified_base 2: mod_base = OTHER; note = 2'O-methyl uridine phosphorothioate
  modified_base 3: mod_base = OTHER; note = 2'-fluoro cytidine
  modified_base 4: mod_base = OTHER; note = 2'O-methyl cytidine
  modified_base 5: mod_base = OTHER; note = 2'-fluoro adenosine
  modified_base 6: mod_base = OTHER; note = 2'O-methyl adenosine
  modified_base 7: mod_base = OTHER; note = 2'-fluoro adenosine
  modified_base 8: mod_base = OTHER; note = 2'O-methyl guanosine
  modified_base 9: mod_base = OTHER; note = 2'-fluoro adenosine
  modified_base 10: mod_base = OTHER; note = 2'O-methyl cytidine
  modified_base 11: mod_base = OTHER; note = 2'-fluoro guanosine
  modified_base 12: mod_base = OTHER; note = 2'O-methyl adenosine
  modified_base 13: mod_base = OTHER; note = 2'-fluoro adenosine
  modified_base 14: mod_base = OTHER; note = 2'O-methyl guanosine
  modified_base 15: mod_base = OTHER; note = 2'-fluoro uridine
  modified_base 16: mod_base = OTHER; note = 2'O-methyl cytidine
  modified_base 17: mod_base = OTHER; note = 2'-fluoro guanosine
  modified_base 18: mod_base = OTHER; note = 2'O-methyl uridine
  modified_base 19: mod_base = OTHER; note = 2'-fluoro guanosine
  modified_base 20: mod_base = OTHER; note = 2'O-methyl guanosine phosphorothioate
  modified_base 21: mod_base = OTHER; note = 2'-fluoro adenosine
gtccaaagacgaagtcgtgga

SEQ ID NO: 1235 - RNA, 21 nt, synthetic construct
  source 1..21: mol_type = other RNA
  modified_base 1: mod_base = OTHER; note = 2'-fluoro uridine phosphorothioate
  modified_base 2: mod_base = OTHER; note = 2'O-methyl cytidine phosphorothioate
  modified_base 3: mod_base = OTHER; note = 2'-fluoro cytidine
  modified_base 4: mod_base = OTHER; note = 2'O-methyl adenosine
  modified_base 5: mod_base = OTHER; note = 2'-fluoro adenosine
  modified_base 6: mod_base = OTHER; note = 2'O-methyl adenosine
  modified_base 7: mod_base = OTHER; note = 2'-fluoro guanosine
  modified_base 8: mod_base = OTHER; note = 2'O-methyl adenosine
  modified_base 9: mod_base = OTHER; note = 2'-fluoro cytidine
  modified_base 10: mod_base = OTHER; note = 2'O-methyl guanosine
  modified_base 11: mod_base = OTHER; note = 2'-fluoro adenosine
  modified_base 12: mod_base = OTHER; note = 2'O-methyl adenosine
  modified_base 13: mod_base = OTHER; note = 2'-fluoro guanosine
  modified_base 14: mod_base = OTHER; note = 2'O-methyl uridine
  modified_base 15: mod_base = OTHER; note = 2'-fluoro cytidine
  modified_base 16: mod_base = OTHER; note = 2'O-methyl guanosine
  modified_base 17: mod_base = OTHER; note = 2'-fluoro uridine
  modified_base 18: mod_base = OTHER; note = 2'O-methyl guanosine
  modified_base 19: mod_base = OTHER; note = 2'-fluoro guanosine
  modified_base 20: mod_base = OTHER; note = 2'O-methyl adenosine phosphorothioate
  modified_base 21: mod_base = OTHER; note = 2'-fluoro uridine
tccaaagacgaagtcgtggat

SEQ ID NO: 1236 - RNA, 21 nt, synthetic construct
  source 1..21: mol_type = other RNA
  modified_base 1: mod_base = OTHER; note = 2'-fluoro cytidine phosphorothioate
  modified_base 2: mod_base = OTHER; note = 2'O-methyl adenosine phosphorothioate
  modified_base 3: mod_base = OTHER; note = 2'-fluoro adenosine
  modified_base 4: mod_base = OTHER; note = 2'O-methyl adenosine
  modified_base 5: mod_base = OTHER; note = 2'-fluoro guanosine
  modified_base 6: mod_base = OTHER; note = 2'O-methyl adenosine
  modified_base 7: mod_base = OTHER; note = 2'-fluoro cytidine
  modified_base 8: mod_base = OTHER; note = 2'O-methyl guanosine
  modified_base 9: mod_base = OTHER; note = 2'-fluoro adenosine
  modified_base 10: mod_base = OTHER; note = 2'O-methyl adenosine
  modified_base 11: mod_base = OTHER; note = 2'-fluoro guanosine
  modified_base 12: mod_base = OTHER; note = 2'O-methyl uridine
  modified_base 13: mod_base = OTHER; note = 2'-fluoro cytidine
  modified_base 14: mod_base = OTHER; note = 2'O-methyl guanosine
  modified_base 15: mod_base = OTHER; note = 2'-fluoro uridine
  modified_base 16: mod_base = OTHER; note = 2'O-methyl guanosine
  modified_base 17: mod_base = OTHER; note = 2'-fluoro guanosine
  modified_base 18: mod_base = OTHER; note = 2'O-methyl adenosine
  modified_base 19: mod_base = OTHER; note = 2'-fluoro uridine
  modified_base 20: mod_base = OTHER; note = 2'O-methyl guanosine phosphorothioate
  modified_base 21: mod_base = OTHER; note = 2'-fluoro cytidine
caaagacgaagtcgtggatgc

SEQ ID NO: 1237 - RNA, 21 nt, synthetic construct
  source 1..21: mol_type = other RNA
  modified_base 1: mod_base = OTHER; note = 2'-fluoro adenosine phosphorothioate
  modified_base 2: mod_base = OTHER; note = 2'O-methyl adenosine phosphorothioate
  modified_base 3: mod_base = OTHER; note = 2'-fluoro adenosine
  modified_base 4: mod_base = OTHER; note = 2'O-methyl guanosine
  modified_base 5: mod_base = OTHER; note = 2'-fluoro adenosine
  modified_base 6: mod_base = OTHER; note = 2'O-methyl cytidine
  modified_base 7: mod_base = OTHER; note = 2'-fluoro guanosine
  modified_base 8: mod_base = OTHER; note = 2'O-methyl adenosine
  modified_base 9: mod_base = OTHER; note = 2'-fluoro adenosine
  modified_base 10: mod_base = OTHER; note = 2'O-methyl guanosine
  modified_base 11: mod_base = OTHER; note = 2'-fluoro uridine
  modified_base 12: mod_base = OTHER; note = 2'O-methyl cytidine
  modified_base 13: mod_base = OTHER; note = 2'-fluoro guanosine
  modified_base 14: mod_base = OTHER; note = 2'O-methyl uridine
  modified_base 15: mod_base = OTHER; note = 2'-fluoro guanosine
  modified_base 16: mod_base = OTHER; note = 2'O-methyl guanosine
  modified_base 17: mod_base = OTHER; note = 2'-fluoro adenosine
  modified_base 18: mod_base = OTHER; note = 2'O-methyl uridine
  modified_base 19: mod_base = OTHER; note = 2'-fluoro guanosine
  modified_base 20: mod_base = OTHER; note = 2'O-methyl cytidine phosphorothioate
  modified_base 21: mod_base = OTHER; note = 2'-fluoro cytidine
aaagacgaagtcgtggatgcc

SEQ ID NO: 1238 - RNA, 21 nt, synthetic construct
  source 1..21: mol_type = other RNA
  modified_base 1: mod_base = OTHER; note = 2'-fluoro adenosine phosphorothioate
  modified_base 2: mod_base = OTHER; note = 2'O-methyl adenosine phosphorothioate
  modified_base 3: mod_base = OTHER; note = 2'-fluoro guanosine
  modified_base 4: mod_base = OTHER; note = 2'O-methyl adenosine
  modified_base 5: mod_base = OTHER; note = 2'-fluoro cytidine
  modified_base 6: mod_base = OTHER; note = 2'O-methyl guanosine
  modified_base 7: mod_base = OTHER; note = 2'-fluoro adenosine
  modified_base 8: mod_base = OTHER; note = 2'O-methyl adenosine
  modified_base 9: mod_base = OTHER; note = 2'-fluoro guanosine
  modified_base 10: mod_base = OTHER; note = 2'O-methyl uridine
  modified_base 11: mod_base = OTHER; note = 2'-fluoro cytidine
  modified_base 12: mod_base = OTHER; note = 2'O-methyl guanosine
  modified_base 13: mod_base = OTHER; note = 2'-fluoro uridine
  modified_base 14: mod_base = OTHER; note = 2'O-methyl guanosine
  modified_base 15: mod_base = OTHER; note = 2'-fluoro guanosine
  modified_base 16: mod_base = OTHER; note = 2'O-methyl adenosine
  modified_base 17: mod_base = OTHER; note = 2'-fluoro uridine
  modified_base 18: mod_base = OTHER; note = 2'O-methyl guanosine
  modified_base 19: mod_base = OTHER; note = 2'-fluoro cytidine
  modified_base 20: mod_base = OTHER; note = 2'O-methyl cytidine phosphorothioate
  modified_base 21: mod_base = OTHER; note = 2'-fluoro uridine
aagacgaagtcgtggatgcct

SEQ ID NO: 1239 - RNA, 21 nt, synthetic construct
  source 1..21: mol_type = other RNA
  modified_base 1: mod_base = OTHER; note = 2'-fluoro adenosine phosphorothioate
  modified_base 2: mod_base = OTHER; note = 2'O-methyl guanosine phosphorothioate
  modified_base 3: mod_base = OTHER; note = 2'-fluoro adenosine
  modified_base 4: mod_base = OTHER; note = 2'O-methyl cytidine
  modified_base 5: mod_base = OTHER; note = 2'-fluoro guanosine
  modified_base 6: mod_base = OTHER; note = 2'O-methyl adenosine
  modified_base 7: mod_base = OTHER; note = 2'-fluoro adenosine
  modified_base 8: mod_base = OTHER; note = 2'O-methyl guanosine
  modified_base 9: mod_base = OTHER; note = 2'-fluoro uridine
  modified_base 10: mod_base = OTHER; note = 2'O-methyl cytidine
  modified_base 11: mod_base = OTHER; note = 2'-fluoro guanosine
  modified_base 12: mod_base = OTHER; note = 2'O-methyl uridine
  modified_base 13: mod_base = OTHER; note = 2'-fluoro guanosine
  modified_base 14: mod_base = OTHER; note = 2'O-methyl guanosine
  modified_base 15: mod_base = OTHER; note = 2'-fluoro adenosine
  modified_base 16: mod_base = OTHER; note = 2'O-methyl uridine
  modified_base 17: mod_base = OTHER; note = 2'-fluoro guanosine
  modified_base 18: mod_base = OTHER; note = 2'O-methyl cytidine
  modified_base 19: mod_base = OTHER; note = 2'-fluoro cytidine
  modified_base 20: mod_base = OTHER; note = 2'O-methyl uridine phosphorothioate
  modified_base 21: mod_base = OTHER; note = 2'-fluoro uridine
agacgaagtcgtggatgcctt

SEQ ID NO: 1240 - RNA, 21 nt, synthetic construct
  source 1..21: mol_type = other RNA
  modified_base 1: mod_base = OTHER; note = 2'-fluoro adenosine phosphorothioate
  modified_base 2: mod_base = OTHER; note = 2'O-methyl cytidine phosphorothioate
  modified_base 3: mod_base = OTHER; note = 2'-fluoro guanosine
  modified_base 4: mod_base = OTHER; note = 2'O-methyl adenosine
  modified_base 5: mod_base = OTHER; note = 2'-fluoro adenosine
  modified_base 6: mod_base = OTHER; note = 2'O-methyl guanosine
  modified_base 7: mod_base = OTHER; note = 2'-fluoro uridine
  modified_base 8: mod_base = OTHER; note = 2'O-methyl cytidine
  modified_base 9: mod_base = OTHER; note = 2'-fluoro guanosine
  modified_base 10: mod_base = OTHER; note = 2'O-methyl uridine
  modified_base 11: mod_base = OTHER; note = 2'-fluoro guanosine
  modified_base 12: mod_base = OTHER; note = 2'O-methyl guanosine
  modified_base 13: mod_base = OTHER; note = 2'-fluoro adenosine
  modified_base 14: mod_base = OTHER; note = 2'O-methyl uridine
  modified_base 15: mod_base = OTHER; note = 2'-fluoro guanosine
  modified_base 16: mod_base = OTHER; note = 2'O-methyl cytidine
  modified_base 17: mod_base = OTHER; note = 2'-fluoro cytidine
  modified_base 18: mod_base = OTHER; note = 2'O-methyl uridine
  modified_base 19: mod_base = OTHER; note = 2'-fluoro uridine
  modified_base 20: mod_base = OTHER; note = 2'O-methyl guanosine phosphorothioate
  modified_base 21: mod_base = OTHER; note = 2'-fluoro guanosine
acgaagtcgtggatgccttgg

SEQ ID NO: 1241 - RNA, 21 nt, synthetic construct
  source 1..21: mol_type = other RNA
  modified_base 1: mod_base = OTHER; note = 2'-fluoro cytidine phosphorothioate
  modified_base 2: mod_base = OTHER; note = 2'O-methyl guanosine phosphorothioate
  modified_base 3: mod_base = OTHER; note = 2'-fluoro adenosine
  modified_base 4: mod_base = OTHER; note = 2'O-methyl adenosine
  modified_base 5: mod_base = OTHER; note = 2'-fluoro guanosine
  modified_base 6: mod_base = OTHER; note = 2'O-methyl uridine
  modified_base 7: mod_base = OTHER; note = 2'-fluoro cytidine
  modified_base 8: mod_base = OTHER; note = 2'O-methyl guanosine
  modified_base 9: mod_base = OTHER; note = 2'-fluoro uridine
  modified_base 10: mod_base = OTHER; note = 2'O-methyl guanosine
  modified_base 11: mod_base = OTHER; note = 2'-fluoro guanosine
  modified_base 12: mod_base = OTHER; note = 2'O-methyl adenosine
  modified_base 13: mod_base = OTHER; note = 2'-fluoro uridine
  modified_base 14: mod_base = OTHER; note = 2'O-methyl guanosine
  modified_base 15: mod_base = OTHER; note = 2'-fluoro cytidine
  modified_base 16: mod_base = OTHER; note = 2'O-methyl cytidine
  modified_base 17: mod_base = OTHER; note = 2'-fluoro uridine
  modified_base 18: mod_base = OTHER; note = 2'O-methyl uridine
  modified_base 19: mod_base = OTHER; note = 2'-fluoro guanosine
  modified_base 20: mod_base = OTHER; note = 2'O-methyl guanosine phosphorothioate
  modified_base 21: mod_base = OTHER; note = 2'-fluoro uridine
cgaagtcgtggatgccttggt

SEQ ID NO: 1242 - RNA, 21 nt, synthetic construct
  source 1..21: mol_type = other RNA
  modified_base 1: mod_base = OTHER; note = 2'-fluoro guanosine phosphorothioate
  modified_base 2: mod_base = OTHER; note = 2'O-methyl adenosine phosphorothioate
  modified_base 3: mod_base = OTHER; note = 2'-fluoro adenosine
  modified_base 4: mod_base = OTHER; note = 2'O-methyl guanosine
  modified_base 5: mod_base = OTHER; note = 2'-fluoro uridine
  modified_base 6: mod_base = OTHER; note = 2'O-methyl cytidine
  modified_base 7: mod_base = OTHER; note = 2'-fluoro guanosine
  modified_base 8: mod_base = OTHER; note = 2'O-methyl uridine
  modified_base 9: mod_base = OTHER; note = 2'-fluoro guanosine
  modified_base 10: mod_base = OTHER; note = 2'O-methyl guanosine
  modified_base 11: mod_base = OTHER; note = 2'-fluoro adenosine
  modified_base 12: mod_base = OTHER; note = 2'O-methyl uridine
  modified_base 13: mod_base = OTHER; note = 2'-fluoro guanosine
  modified_base 14: mod_base = OTHER; note = 2'O-methyl cytidine
  modified_base 15: mod_base = OTHER; note = 2'-fluoro cytidine
  modified_base 16: mod_base = OTHER; note = 2'O-methyl uridine
  modified_base 17: mod_base = OTHER; note = 2'-fluoro uridine
  modified_base 18: mod_base = OTHER; note = 2'O-methyl guanosine
  modified_base 19: mod_base = OTHER; note = 2'-fluoro guanosine
  modified_base 20: mod_base = OTHER; note = 2'O-methyl uridine phosphorothioate
  modified_base 21: mod_base = OTHER; note = 2'-fluoro adenosine
gaagtcgtggatgccttggta

SEQ ID NO: 1243 - RNA, 21 nt, synthetic construct
  source 1..21: mol_type = other RNA
  modified_base 1: mod_base = OTHER; note = 2'-fluoro adenosine phosphorothioate
  modified_base 2: mod_base = OTHER; note = 2'O-methyl adenosine phosphorothioate
  modified_base 3: mod_base = OTHER; note = 2'-fluoro guanosine
  modified_base 4: mod_base = OTHER; note = 2'O-methyl uridine
  modified_base 5: mod_base = OTHER; note = 2'-fluoro cytidine
  modified_base 6: mod_base = OTHER; note = 2'O-methyl guanosine
  modified_base 7: mod_base = OTHER; note = 2'-fluoro uridine
  modified_base 8: mod_base = OTHER; note = 2'O-methyl guanosine
  modified_base 9: mod_base = OTHER; note = 2'-fluoro guanosine
  modified_base 10: mod_base = OTHER; note = 2'O-methyl adenosine
  modified_base 11: mod_base = OTHER; note = 2'-fluoro uridine
  modified_base 12: mod_base = OTHER; note = 2'O-methyl guanosine
  modified_base 13: mod_base = OTHER; note = 2'-fluoro cytidine
  modified_base 14: mod_base = OTHER; note = 2'O-methyl cytidine
  modified_base 15: mod_base = OTHER; note = 2'-fluoro uridine
  modified_base 16: mod_base = OTHER; note = 2'O-methyl uridine
  modified_base 17: mod_base = OTHER; note = 2'-fluoro guanosine
  modified_base 18: mod_base = OTHER; note = 2'O-methyl guanosine
  modified_base 19: mod_base = OTHER; note = 2'-fluoro uridine
  modified_base 20: mod_base = OTHER; note = 2'O-methyl adenosine phosphorothioate
  modified_base 21: mod_base = OTHER; note = 2'-fluoro uridine
aagtcgtggatgccttggtat

SEQ ID NO: 1244 - RNA, 21 nt, synthetic construct
  source 1..21: mol_type = other RNA
  modified_base 1: mod_base = OTHER; note = 2'-fluoro guanosine phosphorothioate
  modified_base 2: mod_base = OTHER; note = 2'O-methyl uridine phosphorothioate
  modified_base 3: mod_base = OTHER; note = 2'-fluoro cytidine
  modified_base 4: mod_base = OTHER; note = 2'O-methyl guanosine
  modified_base 5: mod_base = OTHER; note = 2'-fluoro uridine
  modified_base 6: mod_base = OTHER; note = 2'O-methyl guanosine
  modified_base 7: mod_base = OTHER; note = 2'-fluoro guanosine
  modified_base 8: mod_base = OTHER; note = 2'O-methyl adenosine
  modified_base 9: mod_base = OTHER; note = 2'-fluoro uridine
  modified_base 10: mod_base = OTHER; note = 2'O-methyl guanosine
  modified_base 11: mod_base = OTHER; note = 2'-fluoro cytidine
  modified_base 12: mod_base = OTHER; note = 2'O-methyl cytidine
  modified_base 13: mod_base = OTHER; note = 2'-fluoro uridine
  modified_base 14: mod_base = OTHER; note = 2'O-methyl uridine
  modified_base 15: mod_base = OTHER; note = 2'-fluoro guanosine
  modified_base 16: mod_base = OTHER; note = 2'O-methyl guanosine
  modified_base 17: mod_base = OTHER; note = 2'-fluoro uridine
  modified_base 18: mod_base = OTHER; note = 2'O-methyl adenosine
  modified_base 19: mod_base = OTHER; note = 2'-fluoro uridine
  modified_base 20: mod_base = OTHER; note = 2'O-methyl guanosine phosphorothioate
  modified_base 21: mod_base = OTHER; note = 2'-fluoro uridine
gtcgtggatgccttggtatgt

SEQ ID NO: 1245 - RNA, 21 nt, synthetic construct
  source 1..21: mol_type = other RNA
  modified_base 1: mod_base = OTHER; note = 2'-fluoro uridine phosphorothioate
  modified_base 2: mod_base = OTHER; note = 2'O-methyl cytidine phosphorothioate
  modified_base 3: mod_base = OTHER; note = 2'-fluoro guanosine
  modified_base 4: mod_base = OTHER; note = 2'O-methyl uridine
  modified_base 5: mod_base = OTHER; note = 2'-fluoro guanosine
  modified_base 6: mod_base = OTHER; note = 2'O-methyl guanosine
  modified_base 7: mod_base = OTHER; note = 2'-fluoro adenosine
  modified_base 8: mod_base = OTHER; note = 2'O-methyl uridine
  modified_base 9: mod_base = OTHER; note = 2'-fluoro guanosine
  modified_base 10: mod_base = OTHER; note = 2'O-methyl cytidine
  modified_base 11: mod_base = OTHER; note = 2'-fluoro cytidine
  modified_base 12: mod_base = OTHER; note = 2'O-methyl uridine
  modified_base 13: mod_base = OTHER; note = 2'-fluoro uridine
  modified_base 14: mod_base = OTHER; note = 2'O-methyl guanosine
  modified_base 15: mod_base = OTHER; note = 2'-fluoro guanosine
  modified_base 16: mod_base = OTHER; note = 2'O-methyl uridine
  modified_base 17: mod_base = OTHER; note = 2'-fluoro adenosine
  modified_base 18: mod_base = OTHER; note = 2'O-methyl uridine
  modified_base 19: mod_base = OTHER; note = 2'-fluoro guanosine
  modified_base 20: mod_base = OTHER; note = 2'O-methyl uridine phosphorothioate
  modified_base 21: mod_base = OTHER; note = 2'-fluoro uridine
tcgtggatgccttggtatgtt

SEQ ID NO: 1246 - RNA, 21 nt, synthetic construct
  source 1..21: mol_type = other RNA
  modified_base 1: mod_base = OTHER; note = 2'-fluoro guanosine phosphorothioate
  modified_base 2: mod_base = OTHER; note = 2'O-methyl uridine phosphorothioate
  modified_base 3: mod_base = OTHER; note = 2'-fluoro guanosine
  modified_base 4: mod_base = OTHER; note = 2'O-methyl guanosine
  modified_base 5: mod_base = OTHER; note = 2'-fluoro adenosine
  modified_base 6: mod_base = OTHER; note = 2'O-methyl uridine
  modified_base 7: mod_base = OTHER; note = 2'-fluoro guanosine
  modified_base 8: mod_base = OTHER; note = 2'O-methyl cytidine
  modified_base 9: mod_base = OTHER; note = 2'-fluoro cytidine
  modified_base 10: mod_base = OTHER; note = 2'O-methyl uridine
  modified_base 11: mod_base = OTHER; note = 2'-fluoro uridine
  modified_base 12: mod_base = OTHER; note = 2'O-methyl guanosine
  modified_base 13: mod_base = OTHER; note = 2'-fluoro guanosine
  modified_base 14: mod_base = OTHER; note = 2'O-methyl uridine
  modified_base 15: mod_base = OTHER; note = 2'-fluoro adenosine
  modified_base 16: mod_base = OTHER; note = 2'O-methyl uridine
  modified_base 17: mod_base = OTHER; note = 2'-fluoro guanosine
  modified_base 18: mod_base = OTHER; note = 2'O-methyl uridine
  modified_base 19: mod_base = OTHER; note = 2'-fluoro uridine
  modified_base 20: mod_base = OTHER; note = 2'O-methyl cytidine phosphorothioate
  modified_base 21: mod_base = OTHER; note = 2'-fluoro cytidine
gtggatgccttggtatgttcc

SEQ ID NO: 1247 - RNA, 21 nt, synthetic construct
  source 1..21: mol_type = other RNA
  modified_base 1: mod_base = OTHER; note = 2'-fluoro uridine phosphorothioate
  modified_base 2: mod_base = OTHER; note = 2'O-methyl guanosine phosphorothioate
  modified_base 3: mod_base = OTHER; note = 2'-fluoro guanosine
  modified_base 4: mod_base = OTHER; note = 2'O-methyl adenosine
  modified_base 5: mod_base = OTHER; note = 2'-fluoro uridine
  modified_base 6: mod_base = OTHER; note = 2'O-methyl guanosine
  modified_base 7: mod_base = OTHER; note = 2'-fluoro cytidine
  modified_base 8: mod_base = OTHER; note = 2'O-methyl cytidine
  modified_base 9: mod_base = OTHER; note = 2'-fluoro uridine
  modified_base 10: mod_base = OTHER; note = 2'O-methyl uridine
  modified_base 11: mod_base = OTHER; note = 2'-fluoro guanosine
  modified_base 12: mod_base = OTHER; note = 2'O-methyl guanosine
  modified_base 13: mod_base = OTHER; note = 2'-fluoro uridine
  modified_base 14: mod_base = OTHER; note = 2'O-methyl adenosine
  modified_base 15: mod_base = OTHER; note = 2'-fluoro uridine
  modified_base 16: mod_base = OTHER; note = 2'O-methyl guanosine
  modified_base 17: mod_base = OTHER; note = 2'-fluoro uridine
  modified_base 18: mod_base = OTHER; note = 2'O-methyl uridine
  modified_base 19: mod_base = OTHER; note = 2'-fluoro cytidine
  modified_base 20: mod_base = OTHER; note = 2'O-methyl cytidine phosphorothioate
  modified_base 21: mod_base = OTHER; note = 2'-fluoro uridine
tggatgccttggtatgttcct

SEQ ID NO: 1248 - RNA, 21 nt, synthetic construct
  source 1..21: mol_type = other RNA
  modified_base 1: mod_base = OTHER; note = 2'-fluoro guanosine phosphorothioate
  modified_base 2: mod_base = OTHER; note = 2'O-methyl guanosine phosphorothioate
  modified_base 3: mod_base = OTHER; note = 2'-fluoro adenosine
  modified_base 4: mod_base = OTHER; note = 2'O-methyl uridine
  modified_base 5: mod_base = OTHER; note = 2'-fluoro guanosine
  modified_base 6: mod_base = OTHER; note = 2'O-methyl cytidine
  modified_base 7: mod_base = OTHER; note = 2'-fluoro cytidine
  modified_base 8: mod_base = OTHER; note = 2'O-methyl uridine
  modified_base 9: mod_base = OTHER; note = 2'-fluoro uridine
  modified_base 10: mod_base = OTHER; note = 2'O-methyl guanosine
  modified_base 11: mod_base = OTHER; note = 2'-fluoro guanosine
  modified_base 12: mod_base = OTHER; note = 2'O-methyl uridine
  modified_base 13: mod_base = OTHER; note = 2'-fluoro adenosine
  modified_base 14: mod_base = OTHER; note = 2'O-methyl uridine
  modified_base 15: mod_base = OTHER; note = 2'-fluoro guanosine
  modified_base 16: mod_base = OTHER; note = 2'O-methyl uridine
  modified_base 17: mod_base = OTHER; note = 2'-fluoro uridine
  modified_base 18: mod_base = OTHER; note = 2'O-methyl cytidine
  modified_base 19: mod_base = OTHER; note = 2'-fluoro cytidine
  modified_base 20: mod_base = OTHER; note = 2'O-methyl uridine phosphorothioate
  modified_base 21: mod_base = OTHER; note = 2'-fluoro guanosine
ggatgccttggtatgttcctg

SEQ ID NO: 1249 - RNA, 21 nt, synthetic construct
  source 1..21: mol_type = other RNA
  modified_base 1: mod_base = OTHER; note = 2'-fluoro adenosine phosphorothioate
  modified_base 2: mod_base = OTHER; note = 2'O-methyl uridine phosphorothioate
  modified_base 3: mod_base = OTHER; note = 2'-fluoro guanosine
  modified_base 4: mod_base = OTHER; note = 2'O-methyl cytidine
  modified_base 5: mod_base = OTHER; note = 2'-fluoro cytidine
  modified_base 6: mod_base = OTHER; note = 2'O-methyl uridine
  modified_base 7: mod_base = OTHER; note = 2'-fluoro uridine
  modified_base 8: mod_base = OTHER; note = 2'O-methyl guanosine
  modified_base 9: mod_base = OTHER; note = 2'-fluoro guanosine
  modified_base 10: mod_base = OTHER; note = 2'O-methyl uridine
  modified_base 11: mod_base = OTHER; note = 2'-fluoro adenosine
  modified_base 12: mod_base = OTHER; note = 2'O-methyl uridine
  modified_base 13: mod_base = OTHER; note = 2'-fluoro guanosine
  modified_base 14: mod_base = OTHER; note = 2'O-methyl uridine
  modified_base 15: mod_base = OTHER; note = 2'-fluoro uridine
  modified_base 16: mod_base = OTHER; note = 2'O-methyl cytidine
  modified_base 17: mod_base = OTHER; note = 2'-fluoro cytidine
  modified_base 18: mod_base = OTHER; note = 2'O-methyl uridine
  modified_base 19: mod_base = OTHER; note = 2'-fluoro guanosine
  modified_base 20: mod_base = OTHER; note = 2'O-methyl cytidine phosphorothioate
  modified_base 21: mod_base = OTHER; note = 2'-fluoro uridine
atgccttggtatgttcctgct

SEQ ID NO: 1250 - RNA, 21 nt, synthetic construct
  source 1..21: mol_type = other RNA
  modified_base 1: mod_base = OTHER; note = 2'-fluoro guanosine phosphorothioate
  modified_base 2: mod_base = OTHER; note = 2'O-methyl cytidine phosphorothioate
  modified_base 3: mod_base = OTHER; note = 2'-fluoro cytidine
  modified_base 4: mod_base = OTHER; note = 2'O-methyl uridine
  modified_base 5: mod_base = OTHER; note = 2'-fluoro uridine
  modified_base 6: mod_base = OTHER; note = 2'O-methyl guanosine
  modified_base 7: mod_base = OTHER; note = 2'-fluoro guanosine
  modified_base 8: mod_base = OTHER; note = 2'O-methyl uridine
  modified_base 9: mod_base = OTHER; note = 2'-fluoro adenosine
  modified_base 10: mod_base = OTHER; note = 2'O-methyl uridine
  modified_base 11: mod_base = OTHER; note = 2'-fluoro guanosine
  modified_base 12: mod_base = OTHER; note = 2'O-methyl uridine
  modified_base 13: mod_base = OTHER; note = 2'-fluoro uridine
  modified_base 14: mod_base = OTHER; note = 2'O-methyl cytidine
  modified_base 15: mod_base = OTHER; note = 2'-fluoro cytidine
  modified_base 16: mod_base = OTHER; note = 2'O-methyl uridine
  modified_base 17: mod_base = OTHER; note = 2'-fluoro guanosine
  modified_base 18: mod_base = OTHER; note = 2'O-methyl cytidine
  modified_base 19: mod_base = OTHER; note = 2'-fluoro uridine
  modified_base 20: mod_base = OTHER; note = 2'O-methyl uridine phosphorothioate
  modified_base 21: mod_base = OTHER; note = 2'-fluoro cytidine
gccttggtatgttcctgcttc

SEQ ID NO: 1251 - RNA, 21 nt, synthetic construct
  source 1..21: mol_type = other RNA
  modified_base 1: mod_base = OTHER; note = 2'-fluoro uridine phosphorothioate
  modified_base 2: mod_base = OTHER; note = 2'O-methyl guanosine phosphorothioate
  modified_base 3: mod_base = OTHER; note = 2'-fluoro uridine
  modified_base 4: mod_base = OTHER; note = 2'O-methyl uridine
  modified_base 5: mod_base = OTHER; note = 2'-fluoro cytidine
  modified_base 6: mod_base = OTHER; note = 2'O-methyl cytidine
  modified_base 7: mod_base = OTHER; note = 2'-fluoro uridine
  modified_base 8: mod_base = OTHER; note = 2'O-methyl guanosine
  modified_base 9: mod_base = OTHER; note = 2'-fluoro cytidine
  modified_base 10: mod_base = OTHER; note = 2'O-methyl uridine
  modified_base 11: mod_base = OTHER; note = 2'-fluoro uridine
  modified_base 12: mod_base = OTHER; note = 2'O-methyl cytidine
  modified_base 13: mod_base = OTHER; note = 2'-fluoro adenosine
  modified_base 14: mod_base = OTHER; note = 2'O-methyl uridine
  modified_base 15: mod_base = OTHER; note = 2'-fluoro guanosine
  modified_base 16: mod_base = OTHER; note = 2'O-methyl cytidine
  modified_base 17: mod_base = OTHER; note = 2'-fluoro cytidine
  modified_base 18: mod_base = OTHER; note = 2'O-methyl cytidine
  modified_base 19: mod_base = OTHER; note = 2'-fluoro uridine
  modified_base 20: mod_base = OTHER; note = 2'O-methyl uridine phosphorothioate
  modified_base 21: mod_base = OTHER; note = 2'-fluoro cytidine
tgttcctgcttcatgcccttc

SEQ ID NO: 1252 - RNA, 21 nt, synthetic construct
  source 1..21: mol_type = other RNA
  modified_base 1: mod_base = OTHER; note = 2'-fluoro uridine phosphorothioate
  modified_base 2: mod_base = OTHER; note = 2'O-methyl cytidine phosphorothioate
  modified_base 3: mod_base = OTHER; note = 2'-fluoro cytidine
  modified_base 4: mod_base = OTHER; note = 2'O-methyl uridine
  modified_base 5: mod_base = OTHER; note = 2'-fluoro guanosine
  modified_base 6: mod_base = OTHER; note = 2'O-methyl cytidine
  modified_base 7: mod_base = OTHER; note = 2'-fluoro uridine
  modified_base 8: mod_base = OTHER; note = 2'O-methyl uridine
  modified_base 9: mod_base = OTHER; note = 2'-fluoro cytidine
  modified_base 10: mod_base = OTHER; note = 2'O-methyl adenosine
  modified_base 11: mod_base = OTHER; note = 2'-fluoro uridine
  modified_base 12: mod_base = OTHER; note = 2'O-methyl guanosine
  modified_base 13: mod_base = OTHER; note = 2'-fluoro cytidine
  modified_base 14: mod_base = OTHER; note = 2'O-methyl cytidine
  modified_base 15: mod_base = OTHER; note = 2'-fluoro cytidine
  modified_base 16: mod_base = OTHER; note = 2'O-methyl uridine
  modified_base 17: mod_base = OTHER; note = 2'-fluoro uridine
  modified_base 18: mod_base = OTHER; note = 2'O-methyl cytidine
  modified_base 19: mod_base = OTHER; note = 2'-fluoro uridine
  modified_base 20: mod_base = OTHER; note = 2'O-methyl adenosine phosphorothioate
  modified_base 21: mod_base = OTHER; note = 2'-fluoro cytidine
tcctgcttcatgcccttctac

SEQ ID NO: 1253 - RNA, 21 nt, synthetic construct
  source 1..21: mol_type = other RNA
  modified_base 1: mod_base = OTHER; note = 2'-fluoro adenosine phosphorothioate
  modified_base 2: mod_base = OTHER; note = 2'O-methyl guanosine phosphorothioate
  modified_base 3: mod_base = OTHER; note = 2'-fluoro uridine
  modified_base 4: mod_base = OTHER; note = 2'O-methyl guanosine
  modified_base 5: mod_base = OTHER; note = 2'-fluoro guanosine
  modified_base 6: mod_base = OTHER; note = 2'O-methyl cytidine
  modified_base 7: mod_base = OTHER; note = 2'-fluoro cytidine
  modified_base 8: mod_base = OTHER; note = 2'O-methyl uridine
  modified_base 9: mod_base = OTHER; note = 2'-fluoro uridine
  modified_base 10: mod_base = OTHER; note = 2'O-methyl adenosine
  modified_base 11: mod_base = OTHER; note = 2'-fluoro uridine
  modified_base 12: mod_base = OTHER; note = 2'O-methyl cytidine
  modified_base 13: mod_base = OTHER; note = 2'-fluoro cytidine
  modified_base 14: mod_base = OTHER; note = 2'O-methyl cytidine
  modified_base 15: mod_base = OTHER; note = 2'-fluoro uridine
  modified_base 16: mod_base = OTHER; note = 2'O-methyl cytidine
  modified_base 17: mod_base = OTHER; note = 2'-fluoro cytidine
  modified_base 18: mod_base = OTHER; note = 2'O-methyl uridine
  modified_base 19: mod_base = OTHER; note = 2'-fluoro uridine
  modified_base 20: mod_base = OTHER; note = 2'O-methyl cytidine phosphorothioate
  modified_base 21: mod_base = OTHER; note = 2'-fluoro cytidine
agtggccttatccctccttcc

SEQ ID NO: 1254 - RNA, 21 nt, synthetic construct
  source 1..21: mol_type = other RNA
  modified_base 1: mod_base = OTHER; note = 2'-fluoro guanosine phosphorothioate
  modified_base 2: mod_base = OTHER; note = 2'O-methyl guanosine phosphorothioate
  modified_base 3: mod_base = OTHER; note = 2'-fluoro cytidine
  modified_base 4: mod_base = OTHER; note = 2'O-methyl cytidine
  modified_base 5: mod_base = OTHER; note = 2'-fluoro uridine
  modified_base 6: mod_base = OTHER; note = 2'O-methyl uridine
  modified_base 7: mod_base = OTHER; note = 2'-fluoro adenosine
  modified_base 8: mod_base = OTHER; note = 2'O-methyl uridine
  modified_base 9: mod_base = OTHER; note = 2'-fluoro cytidine
  modified_base 10: mod_base = OTHER; note = 2'O-methyl cytidine
  modified_base 11: mod_base = OTHER; note = 2'-fluoro cytidine
  modified_base 12: mod_base = OTHER; note = 2'O-methyl uridine
  modified_base 13: mod_base = OTHER; note = 2'-fluoro cytidine
  modified_base 14: mod_base = OTHER; note = 2'O-methyl cytidine
  modified_base 15: mod_base = OTHER; note = 2'-fluoro uridine
  modified_base 16: mod_base = OTHER; note = 2'O-methyl uridine
  modified_base 17: mod_base = OTHER; note = 2'-fluoro cytidine
  modified_base 18: mod_base = OTHER; note = 2'O-methyl cytidine
  modified_base 19: mod_base = OTHER; note = 2'-fluoro uridine
  modified_base 20: mod_base = OTHER; note = 2'O-methyl uridine phosphorothioate
  modified_base 21: mod_base = OTHER; note = 2'-fluoro cytidine
ggccttatccctccttccttc

SEQ ID NO: 1255 - RNA, 21 nt, synthetic construct
  source 1..21: mol_type = other RNA
  modified_base 1: mod_base = OTHER; note = 2'-fluoro cytidine phosphorothioate
  modified_base 2: mod_base = OTHER; note = 2'O-methyl cytidine phosphorothioate
  modified_base 3: mod_base = OTHER; note = 2'-fluoro uridine
  modified_base 4: mod_base = OTHER; note = 2'O-methyl uridine
  modified_base 5: mod_base = OTHER; note = 2'-fluoro adenosine
  modified_base 6: mod_base = OTHER; note = 2'O-methyl uridine
  modified_base 7: mod_base = OTHER; note = 2'-fluoro cytidine
  modified_base 8: mod_base = OTHER; note = 2'O-methyl cytidine
  modified_base 9: mod_base = OTHER; note = 2'-fluoro cytidine
  modified_base 10: mod_base = OTHER; note = 2'O-methyl uridine
  modified_base 11: mod_base = OTHER; note = 2'-fluoro cytidine
  modified_base 12: mod_base = OTHER; note = 2'O-methyl cytidine
  modified_base 13: mod_base = OTHER; note = 2'-fluoro uridine
  modified_base 14: mod_base = OTHER; note = 2'O-methyl uridine
  modified_base 15: mod_base = OTHER; note = 2'-fluoro cytidine
  modified_base 16: mod_base = OTHER; note = 2'O-methyl cytidine
  modified_base 17: mod_base = OTHER; note = 2'-fluoro uridine
  modified_base 18: mod_base = OTHER; note = 2'O-methyl uridine
  modified_base 19: mod_base = OTHER; note = 2'-fluoro cytidine
  modified_base 20: mod_base = OTHER; note = 2'O-methyl adenosine phosphorothioate
  modified_base 21: mod_base = OTHER; note = 2'-fluoro guanosine
ccttatccctccttccttcag

SEQ ID NO: 1256 - RNA, 21 nt, synthetic construct
  source 1..21: mol_type = other RNA
  modified_base 1: mod_base = OTHER; note = 2'-fluoro cytidine phosphorothioate
  modified_base 2: mod_base = OTHER; note = 2'O-methyl uridine phosphorothioate
  modified_base 3: mod_base = OTHER; note = 2'-fluoro uridine
  modified_base 4: mod_base = OTHER; note = 2'O-methyl adenosine
  modified_base 5: mod_base = OTHER; note = 2'-fluoro uridine
  modified_base 6: mod_base = OTHER; note = 2'O-methyl cytidine
  modified_base 7: mod_base = OTHER; note = 2'-fluoro cytidine
  modified_base 8: mod_base = OTHER; note = 2'O-methyl cytidine
  modified_base 9: mod_base = OTHER; note = 2'-fluoro uridine
  modified_base 10: mod_base = OTHER; note = 2'O-methyl cytidine
  modified_base 11: mod_base = OTHER; note = 2'-fluoro cytidine
  modified_base 12: mod_base = OTHER; note = 2'O-methyl uridine
  modified_base 13: mod_base = OTHER; note = 2'-fluoro uridine
  modified_base 14: mod_base = OTHER; note = 2'O-methyl cytidine
  modified_base 15: mod_base = OTHER; note = 2'-fluoro cytidine
  modified_base 16: mod_base = OTHER; note = 2'O-methyl uridine
  modified_base 17: mod_base = OTHER; note = 2'-fluoro uridine
  modified_base 18: mod_base = OTHER; note = 2'O-methyl cytidine
  modified_base 19: mod_base = OTHER; note = 2'-fluoro adenosine
  modified_base 20: mod_base = OTHER; note = 2'O-methyl guanosine phosphorothioate
  modified_base 21: mod_base = OTHER; note = 2'-fluoro adenosine
cttatccctccttccttcaga

SEQ ID NO: 1257 - RNA, 21 nt, synthetic construct
  source 1..21: mol_type = other RNA
  modified_base 1: mod_base = OTHER; note = 2'-fluoro uridine phosphorothioate
  modified_base 2: mod_base = OTHER; note = 2'O-methyl uridine phosphorothioate
  modified_base 3: mod_base = OTHER; note = 2'-fluoro adenosine
  modified_base 4: mod_base = OTHER; note = 2'O-methyl uridine
  modified_base 5: mod_base = OTHER; note = 2'-fluoro cytidine
  modified_base 6: mod_base = OTHER; note = 2'O-methyl cytidine
  modified_base 7: mod_base = OTHER; note = 2'-fluoro cytidine
  modified_base 8: mod_base = OTHER; note = 2'O-methyl uridine
  modified_base 9: mod_base = OTHER; note = 2'-fluoro cytidine
  modified_base 10: mod_base = OTHER; note = 2'O-methyl cytidine
  modified_base 11: mod_base = OTHER; note = 2'-fluoro uridine
  modified_base 12: mod_base = OTHER; note = 2'O-methyl uridine
  modified_base 13: mod_base = OTHER; note = 2'-fluoro cytidine
  modified_base 14: mod_base = OTHER; note = 2'O-methyl cytidine
  modified_base 15: mod_base = OTHER; note = 2'-fluoro uridine
  modified_base 16: mod_base = OTHER; note = 2'O-methyl uridine
  modified_base 17: mod_base = OTHER; note = 2'-fluoro cytidine
  modified_base 18: mod_base = OTHER; note = 2'O-methyl adenosine
  modified_base 19: mod_base = OTHER; note = 2'-fluoro guanosine
  modified_base 20: mod_base = OTHER; note = 2'O-methyl adenosine phosphorothioate
  modified_base 21: mod_base = OTHER; note = 2'-fluoro guanosine
ttatccctccttccttcagag

SEQ ID NO: 1258 - RNA, 21 nt, synthetic construct
  source 1..21: mol_type = other RNA
  modified_base 1: mod_base = OTHER; note = 2'-fluoro cytidine phosphorothioate
  modified_base 2: mod_base = OTHER; note = 2'O-methyl cytidine phosphorothioate
  modified_base 3: mod_base = OTHER; note = 2'-fluoro cytidine
  modified_base 4: mod_base = OTHER; note = 2'O-methyl uridine
  modified_base 5: mod_base = OTHER; note = 2'-fluoro cytidine
  modified_base 6: mod_base = OTHER; note = 2'O-methyl cytidine
  modified_base 7: mod_base = OTHER; note = 2'-fluoro uridine
  modified_base 8: mod_base = OTHER; note = 2'O-methyl uridine
  modified_base 9: mod_base = OTHER; note = 2'-fluoro cytidine
  modified_base 10: mod_base = OTHER; note = 2'O-methyl cytidine
  modified_base 11: mod_base = OTHER; note = 2'-fluoro uridine
  modified_base 12: mod_base = OTHER; note = 2'O-methyl uridine
  modified_base 13: mod_base = OTHER; note = 2'-fluoro cytidine
  modified_base 14: mod_base = OTHER; note = 2'O-methyl adenosine
  modified_base 15: mod_base = OTHER; note = 2'-fluoro guanosine
  modified_base 16: mod_base = OTHER; note = 2'O-methyl adenosine
  modified_base 17: mod_base = OTHER; note = 2'-fluoro guanosine
  modified_base 18: mod_base = OTHER; note = 2'O-methyl guanosine
  modified_base 19: mod_base = OTHER; note = 2'-fluoro cytidine
  modified_base 20: mod_base = OTHER; note = 2'O-methyl guanosine phosphorothioate
  modified_base 21: mod_base = OTHER; note = 2'-fluoro uridine
ccctccttccttcagaggcgt

SEQ ID NO: 1259 - RNA, 21 nt, synthetic construct
  source 1..21: mol_type = other RNA
  modified_base 1: mod_base = OTHER; note = 2'-fluoro cytidine phosphorothioate
  modified_base 2: mod_base = OTHER; note = 2'O-methyl cytidine phosphorothioate
  modified_base 3: mod_base = OTHER; note = 2'-fluoro uridine
  modified_base 4: mod_base = OTHER; note = 2'O-methyl cytidine
  modified_base 5: mod_base = OTHER; note = 2'-fluoro cytidine
  modified_base 6: mod_base = OTHER; note = 2'O-methyl uridine
  modified_base 7: mod_base = OTHER; note = 2'-fluoro uridine
  modified_base 8: mod_base = OTHER; note = 2'O-methyl cytidine
  modified_base 9: mod_base = OTHER; note = 2'-fluoro cytidine
  modified_base 10: mod_base = OTHER; note = 2'O-methyl uridine
  modified_base 11: mod_base = OTHER; note = 2'-fluoro uridine
  modified_base 12: mod_base = OTHER; note = 2'O-methyl cytidine
  modified_base 13: mod_base = OTHER; note = 2'-fluoro adenosine
  modified_base 14: mod_base = OTHER; note = 2'O-methyl guanosine
  modified_base 15: mod_base = OTHER; note = 2'-fluoro adenosine
  modified_base 16: mod_base = OTHER; note = 2'O-methyl guanosine
  modified_base 17: mod_base = OTHER; note = 2'-fluoro guanosine
  modified_base 18: mod_base = OTHER; note = 2'O-methyl cytidine
  modified_base 19: mod_base = OTHER; note = 2'-fluoro guanosine
  modified_base 20: mod_base = OTHER; note = 2'O-methyl uridine phosphorothioate
  modified_base 21: mod_base = OTHER; note = 2'-fluoro guanosine
cctccttccttcagaggcgtg

SEQ ID NO: 1260 - RNA, 21 nt, synthetic construct
  source 1..21: mol_type = other RNA
  modified_base 1: mod_base = OTHER; note = 2'-fluoro cytidine phosphorothioate
  modified_base 2: mod_base = OTHER; note = 2'O-methyl uridine phosphorothioate
  modified_base 3: mod_base = OTHER; note = 2'-fluoro cytidine
  modified_base 4: mod_base = OTHER; note = 2'O-methyl cytidine
  modified_base 5: mod_base = OTHER; note = 2'-fluoro uridine
  modified_base 6: mod_base = OTHER; note = 2'O-methyl uridine
  modified_base 7: mod_base = OTHER; note = 2'-fluoro cytidine
  modified_base 8: mod_base = OTHER; note = 2'O-methyl cytidine
  modified_base 9: mod_base = OTHER; note = 2'-fluoro uridine
  modified_base 10: mod_base = OTHER; note = 2'O-methyl uridine
  modified_base 11: mod_base = OTHER; note = 2'-fluoro cytidine
  modified_base 12: mod_base = OTHER; note = 2'O-methyl adenosine
  modified_base 13: mod_base = OTHER; note = 2'-fluoro guanosine
  modified_base 14: mod_base = OTHER; note = 2'O-methyl adenosine
  modified_base 15: mod_base = OTHER; note = 2'-fluoro guanosine
  modified_base 16: mod_base = OTHER; note = 2'O-methyl guanosine
  modified_base 17: mod_base = OTHER; note = 2'-fluoro cytidine
  modified_base 18: mod_base = OTHER; note = 2'O-methyl guanosine
  modified_base 19: mod_base = OTHER; note = 2'-fluoro uridine
  modified_base 20: mod_base = OTHER; note = 2'O-methyl guanosine phosphorothioate
  modified_base 21: mod_base = OTHER; note = 2'-fluoro cytidine
ctccttccttcagaggcgtgc

SEQ ID NO: 1261 - RNA, 21 nt, synthetic construct
  source 1..21: mol_type = other RNA
  modified_base 1: mod_base = OTHER; note = 2'-fluoro cytidine phosphorothioate
  modified_base 2: mod_base = OTHER; note = 2'O-methyl cytidine phosphorothioate
  modified_base 3: mod_base = OTHER; note = 2'-fluoro uridine
  modified_base 4: mod_base = OTHER; note = 2'O-methyl uridine
  modified_base 5: mod_base = OTHER; note = 2'-fluoro cytidine
  modified_base 6: mod_base = OTHER; note = 2'O-methyl cytidine
  modified_base 7: mod_base = OTHER; note = 2'-fluoro uridine
  modified_base 8: mod_base = OTHER; note = 2'O-methyl uridine
  modified_base 9: mod_base = OTHER; note = 2'-fluoro cytidine
  modified_base 10: mod_base = OTHER; note = 2'O-methyl adenosine
  modified_base 11: mod_base = OTHER; note = 2'-fluoro guanosine
  modified_base 12: mod_base = OTHER; note = 2'O-methyl adenosine
  modified_base 13: mod_base = OTHER; note = 2'-fluoro guanosine
  modified_base 14: mod_base = OTHER; note = 2'O-methyl guanosine
  modified_base 15: mod_base = OTHER; note = 2'-fluoro cytidine
  modified_base 16: mod_base = OTHER; note = 2'O-methyl guanosine
  modified_base 17: mod_base = OTHER; note = 2'-fluoro uridine
  modified_base 18: mod_base = OTHER; note = 2'O-methyl guanosine
  modified_base 19: mod_base = OTHER; note = 2'-fluoro cytidine
  modified_base 20: mod_base = OTHER; note = 2'O-methyl guanosine phosphorothioate
  modified_base 21: mod_base = OTHER; note = 2'-fluoro adenosine
ccttccttcagaggcgtgcga

SEQ ID NO: 1262 - RNA, 21 nt, synthetic construct
  source 1..21: mol_type = other RNA
  modified_base 1: mod_base = OTHER; note = 2'-fluoro cytidine phosphorothioate
  modified_base 2: mod_base = OTHER; note = 2'O-methyl uridine phosphorothioate
  modified_base 3: mod_base = OTHER; note = 2'-fluoro uridine
  modified_base 4: mod_base = OTHER; note = 2'O-methyl cytidine
  modified_base 5: mod_base = OTHER; note = 2'-fluoro cytidine
  modified_base 6: mod_base = OTHER; note = 2'O-methyl uridine
  modified_base 7: mod_base = OTHER; note = 2'-fluoro uridine
  modified_base 8: mod_base = OTHER; note = 2'O-methyl cytidine
  modified_base 9: mod_base = OTHER; note = 2'-fluoro adenosine
  modified_base 10: mod_base = OTHER; note = 2'O-methyl guanosine
  modified_base 11: mod_base = OTHER; note = 2'-fluoro adenosine
  modified_base 12: mod_base = OTHER; note = 2'O-methyl guanosine
  modified_base 13: mod_base = OTHER; note = 2'-fluoro guanosine
  modified_base 14: mod_base = OTHER; note = 2'O-methyl cytidine
  modified_base 15: mod_base = OTHER; note = 2'-fluoro guanosine
  modified_base 16: mod_base = OTHER; note = 2'O-methyl uridine
  modified_base 17: mod_base = OTHER; note = 2'-fluoro guanosine
  modified_base 18: mod_base = OTHER; note = 2'O-methyl cytidine
  modified_base 19: mod_base = OTHER; note = 2'-fluoro guanosine
  modified_base 20: mod_base = OTHER; note = 2'O-methyl adenosine phosphorothioate
  modified_base 21: mod_base = OTHER; note = 2'-fluoro uridine
cttccttcagaggcgtgcgat

SEQ ID NO: 1263 - RNA, 21 nt, synthetic construct
  source 1..21: mol_type = other RNA
  modified_base 1: mod_base = OTHER; note = 2'-fluoro uridine phosphorothioate
  modified_base 2: mod_base = OTHER; note = 2'O-methyl uridine phosphorothioate
  modified_base 3: mod_base = OTHER; note = 2'-fluoro cytidine
  modified_base 4: mod_base = OTHER; note = 2'O-methyl cytidine
  modified_base 5: mod_base = OTHER; note = 2'-fluoro uridine
  modified_base 6: mod_base = OTHER; note = 2'O-methyl uridine
  modified_base 7: mod_base = OTHER; note = 2'-fluoro cytidine
  modified_base 8: mod_base = OTHER; note = 2'O-methyl adenosine
  modified_base 9: mod_base = OTHER; note = 2'-fluoro guanosine
  modified_base 10: mod_base = OTHER; note = 2'O-methyl adenosine
  modified_base 11: mod_base = OTHER; note = 2'-fluoro guanosine
  modified_base 12: mod_base = OTHER; note = 2'O-methyl guanosine
  modified_base 13: mod_base = OTHER; note = 2'-fluoro cytidine
  modified_base 14: mod_base = OTHER; note = 2'O-methyl guanosine
  modified_base 15: mod_base = OTHER; note = 2'-fluoro uridine
  modified_base 16: mod_base = OTHER; note = 2'O-methyl guanosine
  modified_base 17: mod_base = OTHER; note = 2'-fluoro cytidine
  modified_base 18: mod_base = OTHER; note = 2'O-methyl guanosine
  modified_base 19: mod_base = OTHER; note = 2'-fluoro adenosine
  modified_base 20: mod_base = OTHER; note = 2'O-methyl uridine phosphorothioate
  modified_base 21: mod_base = OTHER; note = 2'-fluoro adenosine
ttccttcagaggcgtgcgata

SEQ ID NO: 1264 - RNA, 21 nt, synthetic construct
  source 1..21: mol_type = other RNA
  modified_base 1: mod_base = OTHER; note = 2'-fluoro adenosine phosphorothioate
  modified_base 2: mod_base = OTHER; note = 2'O-methyl uridine phosphorothioate
  modified_base 3: mod_base = OTHER; note = 2'-fluoro adenosine
  modified_base 4: mod_base = OTHER; note = 2'O-methyl uridine
  modified_base 5: mod_base = OTHER; note = 2'-fluoro guanosine
  modified_base 6: mod_base = OTHER; note = 2'O-methyl uridine
  modified_base 7: mod_base = OTHER; note = 2'-fluoro guanosine
  modified_base 8: mod_base = OTHER; note = 2'O-methyl guanosine
  modified_base 9: mod_base = OTHER; note = 2'-fluoro adenosine
  modified_base 10: mod_base = OTHER; note = 2'O-methyl uridine
  modified_base 11: mod_base = OTHER; note = 2'-fluoro guanosine
  modified_base 12: mod_base = OTHER; note = 2'O-methyl guanosine
  modified_base 13: mod_base = OTHER; note = 2'-fluoro adenosine
  modified_base 14: mod_base = OTHER; note = 2'O-methyl guanosine
  modified_base 15: mod_base = OTHER; note = 2'-fluoro guanosine
  modified_base 16: mod_base = OTHER; note = 2'O-methyl adenosine
  modified_base 17: mod_base = OTHER; note = 2'-fluoro guanosine
  modified_base 18: mod_base = OTHER; note = 2'O-methyl uridine
  modified_base 19: mod_base = OTHER; note = 2'-fluoro guanosine
  modified_base 20: mod_base = OTHER; note = 2'O-methyl adenosine phosphorothioate
  modified_base 21: mod_base = OTHER; note = 2'-fluoro guanosine
atatgtggatggaggagtgag

SEQ ID NO: 1265 - RNA, 21 nt, synthetic construct
  source 1..21: mol_type = other RNA
  modified_base 1: mod_base = OTHER; note = 2'-fluoro guanosine phosphorothioate
  modified_base 2: mod_base = OTHER; note = 2'O-methyl guanosine phosphorothioate
  modified_base 3: mod_base = OTHER; note = 2'-fluoro adenosine
  modified_base 4: mod_base = OTHER; note = 2'O-methyl guanosine
  modified_base 5: mod_base = OTHER; note = 2'-fluoro guanosine
  modified_base 6: mod_base = OTHER; note = 2'O-methyl adenosine
  modified_base 7: mod_base = OTHER; note = 2'-fluoro guanosine
  modified_base 8: mod_base = OTHER; note = 2'O-methyl uridine
  modified_base 9: mod_base = OTHER; note = 2'-fluoro guanosine
  modified_base 10: mod_base = OTHER; note = 2'O-methyl adenosine
  modified_base 11: mod_base = OTHER; note = 2'-fluoro guanosine
  modified_base 12: mod_base = OTHER; note = 2'O-methyl uridine
  modified_base 13: mod_base = OTHER; note = 2'-fluoro guanosine
  modified_base 14: mod_base = OTHER; note = 2'O-methyl adenosine
  modified_base 15: mod_base = OTHER; note = 2'-fluoro cytidine
  modified_base 16: mod_base = OTHER; note = 2'O-methyl adenosine
  modified_base 17: mod_base = OTHER; note = 2'-fluoro adenosine
  modified_base 18: mod_base = OTHER; note = 2'O-methyl cytidine
  modified_base 19: mod_base = OTHER; note = 2'-fluoro guanosine
  modified_base 20: mod_base = OTHER; note = 2'O-methyl uridine phosphorothioate
  modified_base 21: mod_base = OTHER; note = 2'-fluoro adenosine
ggaggagtgagtgacaacgta

SEQ ID NO: 1266 - RNA, 21 nt, synthetic construct
  source 1..21: mol_type = other RNA
  modified_base 1: mod_base = OTHER; note = 2'-fluoro adenosine phosphorothioate
  modified_base 2: mod_base = OTHER; note = 2'O-methyl guanosine phosphorothioate
  modified_base 3: mod_base = OTHER; note = 2'-fluoro guanosine
  modified_base 4: mod_base = OTHER; note = 2'O-methyl adenosine
  modified_base 5: mod_base = OTHER; note = 2'-fluoro guanosine
  modified_base 6: mod_base = OTHER; note = 2'O-methyl uridine
  modified_base 7: mod_base = OTHER; note = 2'-fluoro guanosine
  modified_base 8: mod_base = OTHER; note = 2'O-methyl adenosine
  modified_base 9: mod_base = OTHER; note = 2'-fluoro guanosine
  modified_base 10: mod_base = OTHER; note = 2'O-methyl uridine
  modified_base 11: mod_base = OTHER; note = 2'-fluoro guanosine
  modified_base 12: mod_base = OTHER; note = 2'O-methyl adenosine
  modified_base 13: mod_base = OTHER; note = 2'-fluoro cytidine
  modified_base 14: mod_base = OTHER; note = 2'O-methyl adenosine
  modified_base 15: mod_base = OTHER; note = 2'-fluoro adenosine
  modified_base 16: mod_base = OTHER; note = 2'O-methyl cytidine
  modified_base 17: mod_base = OTHER; note = 2'-fluoro guanosine
  modified_base 18: mod_base = OTHER; note = 2'O-methyl uridine
  modified_base 19: mod_base = OTHER; note = 2'-fluoro adenosine
  modified_base 20: mod_base = OTHER; note = 2'O-methyl cytidine phosphorothioate
  modified_base 21: mod_base = OTHER; note = 2'-fluoro cytidine
aggagtgagtgacaacgtacc

SEQ ID NO: 1267 - RNA, 21 nt, synthetic construct
  source 1..21: mol_type = other RNA
  modified_base 1: mod_base = OTHER; note = 2'-fluoro guanosine phosphorothioate
  modified_base 2: mod_base = OTHER; note = 2'O-methyl guanosine phosphorothioate
  modified_base 3: mod_base = OTHER; note = 2'-fluoro adenosine
  modified_base 4: mod_base = OTHER; note = 2'O-methyl guanosine
  modified_base 5: mod_base = OTHER; note = 2'-fluoro uridine
  modified_base 6: mod_base = OTHER; note = 2'O-methyl guanosine
  modified_base 7: mod_base = OTHER; note = 2'-fluoro adenosine
  modified_base 8: mod_base = OTHER; note = 2'O-methyl guanosine
  modified_base 9: mod_base = OTHER; note = 2'-fluoro uridine
  modified_base 10: mod_base = OTHER; note = 2'O-methyl guanosine
  modified_base 11: mod_base = OTHER; note = 2'-fluoro adenosine
  modified_base 12: mod_base = OTHER; note = 2'O-methyl cytidine
  modified_base 13: mod_base = OTHER; note = 2'-fluoro adenosine
  modified_base 14: mod_base = OTHER; note = 2'O-methyl adenosine
  modified_base 15: mod_base = OTHER; note = 2'-fluoro cytidine
  modified_base 16: mod_base = OTHER; note = 2'O-methyl guanosine
  modified_base 17: mod_base = OTHER; note = 2'-fluoro uridine
  modified_base 18: mod_base = OTHER; note = 2'O-methyl adenosine
  modified_base 19: mod_base = OTHER; note = 2'-fluoro cytidine
  modified_base 20: mod_base = OTHER; note = 2'O-methyl cytidine phosphorothioate
  modified_base 21: mod_base = OTHER; note = 2'-fluoro cytidine
ggagtgagtgacaacgtaccc

SEQ ID NO: 1268 - RNA, 21 nt, synthetic construct
  source 1..21: mol_type = other RNA
  modified_base 1: mod_base = OTHER; note = 2'-fluoro guanosine phosphorothioate
  modified_base 2: mod_base = OTHER; note = 2'O-methyl uridine phosphorothioate
  modified_base 3: mod_base = OTHER; note = 2'-fluoro guanosine
  modified_base 4: mod_base = OTHER; note = 2'O-methyl adenosine
  modified_base 5: mod_base = OTHER; note = 2'-fluoro guanosine
  modified_base 6: mod_base = OTHER; note = 2'O-methyl uridine
  modified_base 7: mod_base = OTHER; note = 2'-fluoro guanosine
  modified_base 8: mod_base = OTHER; note = 2'O-methyl adenosine
  modified_base 9: mod_base = OTHER; note = 2'-fluoro cytidine
  modified_base 10: mod_base = OTHER; note = 2'O-methyl adenosine
  modified_base 11: mod_base = OTHER; note = 2'-fluoro adenosine
  modified_base 12: mod_base = OTHER; note = 2'O-methyl cytidine
  modified_base 13: mod_base = OTHER; note = 2'-fluoro guanosine
  modified_base 14: mod_base = OTHER; note = 2'O-methyl uridine
  modified_base 15: mod_base = OTHER; note = 2'-fluoro adenosine
  modified_base 16: mod_base = OTHER; note = 2'O-methyl cytidine
  modified_base 17: mod_base = OTHER; note = 2'-fluoro cytidine
  modified_base 18: mod_base = OTHER; note = 2'O-methyl cytidine
  modified_base 19: mod_base = OTHER; note = 2'-fluoro uridine
  modified_base 20: mod_base = OTHER; note = 2'O-methyl uridine phosphorothioate
  modified_base 21: mod_base = OTHER; note = 2'-fluoro cytidine
gtgagtgacaacgtacccttc

SEQ ID NO: 1269 - RNA, 21 nt, synthetic construct
  source 1..21: mol_type = other RNA
  modified_base 1: mod_base = OTHER; note = 2'-fluoro uridine phosphorothioate
  modified_base 2: mod_base = OTHER; note = 2'O-methyl guanosine phosphorothioate
  modified_base 3: mod_base = OTHER; note = 2'-fluoro adenosine
  modified_base 4: mod_base = OTHER; note = 2'O-methyl uridine
  modified_base 5: mod_base = OTHER; note = 2'-fluoro guanosine
  modified_base 6: mod_base = OTHER; note = 2'O-methyl cytidine
  modified_base 7: mod_base = OTHER; note = 2'-fluoro cytidine
  modified_base 8: mod_base = OTHER; note = 2'O-methyl adenosine
  modified_base 9: mod_base = OTHER; note = 2'-fluoro adenosine
  modified_base 10: mod_base = OTHER; note = 2'O-methyl adenosine
  modified_base 11: mod_base = OTHER; note = 2'-fluoro adenosine
  modified_base 12: mod_base = OTHER; note = 2'O-methyl cytidine
  modified_base 13: mod_base = OTHER; note = 2'-fluoro adenosine
  modified_base 14: mod_base = OTHER; note = 2'O-methyl adenosine
  modified_base 15: mod_base = OTHER; note = 2'-fluoro cytidine
  modified_base 16: mod_base = OTHER; note = 2'O-methyl cytidine
  modified_base 17: mod_base = OTHER; note = 2'-fluoro adenosine
  modified_base 18: mod_base = OTHER; note = 2'O-methyl uridine
  modified_base 19: mod_base = OTHER; note = 2'-fluoro cytidine
  modified_base 20: mod_base = OTHER; note = 2'O-methyl adenosine phosphorothioate
  modified_base 21: mod_base = OTHER; note = 2'-fluoro cytidine
tgatgccaaaacaaccatcac

SEQ ID NO: 1270 - RNA, 21 nt, synthetic construct
  source 1..21: mol_type = other RNA
  modified_base 1: mod_base = OTHER; note = 2'-fluoro guanosine phosphorothioate
  modified_base 2: mod_base = OTHER; note = 2'O-methyl adenosine phosphorothioate
  modified_base 3: mod_base = OTHER; note = 2'-fluoro uridine
  modified_base 4: mod_base = OTHER; note = 2'O-methyl guanosine
  modified_base 5: mod_base = OTHER; note = 2'-fluoro cytidine
  modified_base 6: mod_base = OTHER; note = 2'O-methyl cytidine
  modified_base 7: mod_base = OTHER; note = 2'-fluoro adenosine
  modified_base 8: mod_base = OTHER; note = 2'O-methyl adenosine
  modified_base 9: mod_base = OTHER; note = 2'-fluoro adenosine
  modified_base 10: mod_base = OTHER; note = 2'O-methyl adenosine
  modified_base 11: mod_base = OTHER; note = 2'-fluoro cytidine
  modified_base 12: mod_base = OTHER; note = 2'O-methyl adenosine
  modified_base 13: mod_base = OTHER; note = 2'-fluoro adenosine
  modified_base 14: mod_base = OTHER; note = 2'O-methyl cytidine
  modified_base 15: mod_base = OTHER; note = 2'-fluoro cytidine
  modified_base 16: mod_base = OTHER; note = 2'O-methyl adenosine
  modified_base 17: mod_base = OTHER; note = 2'-fluoro uridine
  modified_base 18: mod_base = OTHER; note = 2'O-methyl cytidine
  modified_base 19: mod_base = OTHER; note = 2'-fluoro adenosine
  modified_base 20: mod_base = OTHER; note = 2'O-methyl cytidine phosphorothioate
  modified_base 21: mod_base = OTHER; note = 2'-fluoro cytidine
gatgccaaaacaaccatcacc

SEQ ID NO: 1271 - RNA, 21 nt, synthetic construct
  source 1..21: mol_type = other RNA
  modified_base 1: mod_base = OTHER; note = 2'-fluoro adenosine phosphorothioate
  modified_base 2: mod_base = OTHER; note = 2'O-methyl uridine phosphorothioate
  modified_base 3: mod_base = OTHER; note = 2'-fluoro guanosine
  modified_base 4: mod_base = OTHER; note = 2'O-methyl cytidine
  modified_base 5: mod_base = OTHER; note = 2'-fluoro cytidine
  modified_base 6: mod_base = OTHER; note = 2'O-methyl adenosine
  modified_base 7: mod_base = OTHER; note = 2'-fluoro adenosine
  modified_base 8: mod_base = OTHER; note = 2'O-methyl adenosine
  modified_base 9: mod_base = OTHER; note = 2'-fluoro adenosine
  modified_base 10: mod_base = OTHER; note = 2'O-methyl cytidine
  modified_base 11: mod_base = OTHER; note = 2'-fluoro adenosine
  modified_base 12: mod_base = OTHER; note = 2'O-methyl adenosine
  modified_base 13: mod_base = OTHER; note = 2'-fluoro cytidine
  modified_base 14: mod_base = OTHER; note = 2'O-methyl cytidine
  modified_base 15: mod_base = OTHER; note = 2'-fluoro adenosine
  modified_base 16: mod_base = OTHER; note = 2'O-methyl uridine
  modified_base 17: mod_base = OTHER; note = 2'-fluoro cytidine
  modified_base 18: mod_base = OTHER; note = 2'O-methyl adenosine
  modified_base 19: mod_base = OTHER; note = 2'-fluoro cytidine
  modified_base 20: mod_base = OTHER; note = 2'O-methyl cytidine phosphorothioate
  modified_base 21: mod_base = OTHER; note = 2'-fluoro guanosine
atgccaaaacaaccatcaccg

SEQ ID NO: 1272 - RNA, 21 nt, synthetic construct
  source 1..21: mol_type = other RNA
  modified_base 1: mod_base = OTHER; note = 2'-fluoro cytidine phosphorothioate
  modified_base 2: mod_base = OTHER; note = 2'O-methyl cytidine phosphorothioate
  modified_base 3: mod_base = OTHER; note = 2'-fluoro adenosine
  modified_base 4: mod_base = OTHER; note = 2'O-methyl adenosine
  modified_base 5: mod_base = OTHER; note = 2'-fluoro adenosine
  modified_base 6: mod_base = OTHER; note = 2'O-methyl adenosine
  modified_base 7: mod_base = OTHER; note = 2'-fluoro cytidine
  modified_base 8: mod_base = OTHER; note = 2'O-methyl adenosine
  modified_base 9: mod_base = OTHER; note = 2'-fluoro adenosine
  modified_base 10: mod_base = OTHER; note = 2'O-methyl cytidine
  modified_base 11: mod_base = OTHER; note = 2'-fluoro cytidine
  modified_base 12: mod_base = OTHER; note = 2'O-methyl adenosine
  modified_base 13: mod_base = OTHER; note = 2'-fluoro uridine
  modified_base 14: mod_base = OTHER; note = 2'O-methyl cytidine
  modified_base 15: mod_base = OTHER; note = 2'-fluoro adenosine
  modified_base 16: mod_base = OTHER; note = 2'O-methyl cytidine
  modified_base 17: mod_base = OTHER; note = 2'-fluoro cytidine
  modified_base 18: mod_base = OTHER; note = 2'O-methyl guanosine
  modified_base 19: mod_base = OTHER; note = 2'-fluoro uridine
  modified_base 20: mod_base = OTHER; note = 2'O-methyl guanosine phosphorothioate
  modified_base 21: mod_base = OTHER; note = 2'-fluoro uridine
ccaaaacaaccatcaccgtgt

SEQ ID NO: 1273 - RNA, 21 nt, synthetic construct
  source 1..21: mol_type = other RNA
  modified_base 1: mod_base = OTHER; note = 2'-fluoro cytidine phosphorothioate
  modified_base 2: mod_base = OTHER; note = 2'O-methyl adenosine phosphorothioate
  modified_base 3: mod_base = OTHER; note = 2'-fluoro adenosine
  modified_base 4: mod_base = OTHER; note = 2'O-methyl adenosine
  modified_base 5: mod_base = OTHER; note = 2'-fluoro adenosine
  modified_base 6: mod_base = OTHER; note = 2'O-methyl cytidine
  modified_base 7: mod_base = OTHER; note = 2'-fluoro adenosine
  modified_base 8: mod_base = OTHER; note = 2'O-methyl adenosine
  modified_base 9: mod_base = OTHER; note = 2'-fluoro cytidine
  modified_base 10: mod_base = OTHER; note = 2'O-methyl cytidine
  modified_base 11: mod_base = OTHER; note = 2'-fluoro adenosine
  modified_base 12: mod_base = OTHER; note = 2'O-methyl uridine
  modified_base 13: mod_base = OTHER; note = 2'-fluoro cytidine
  modified_base 14: mod_base = OTHER; note = 2'O-methyl adenosine
  modified_base 15: mod_base = OTHER; note = 2'-fluoro cytidine
  modified_base 16: mod_base = OTHER; note = 2'O-methyl cytidine
  modified_base 17: mod_base = OTHER; note = 2'-fluoro guanosine
  modified_base 18: mod_base = OTHER; note = 2'O-methyl uridine
  modified_base 19: mod_base = OTHER; note = 2'-fluoro guanosine
  modified_base 20: mod_base = OTHER; note = 2'O-methyl uridine phosphorothioate
  modified_base 21: mod_base = OTHER; note = 2'-fluoro cytidine
caaaacaaccatcaccgtgtc

SEQ ID NO: 1274 - RNA, 21 nt, synthetic construct
  source 1..21: mol_type = other RNA
  modified_base 1: mod_base = OTHER; note = 2'-fluoro adenosine phosphorothioate
  modified_base 2: mod_base = OTHER; note = 2'O-methyl adenosine phosphorothioate
  modified_base 3: mod_base = OTHER; note = 2'-fluoro adenosine
  modified_base 4: mod_base = OTHER; note = 2'O-methyl cytidine
  modified_base 5: mod_base = OTHER; note = 2'-fluoro adenosine
  modified_base 6: mod_base = OTHER; note = 2'O-methyl adenosine
  modified_base 7: mod_base = OTHER; note = 2'-fluoro cytidine
  modified_base 8: mod_base = OTHER; note = 2'O-methyl cytidine
  modified_base 9: mod_base = OTHER; note = 2'-fluoro adenosine
  modified_base 10: mod_base = OTHER; note = 2'O-methyl uridine
  modified_base 11: mod_base = OTHER; note = 2'-fluoro cytidine
  modified_base 12: mod_base = OTHER; note = 2'O-methyl adenosine
  modified_base 13: mod_base = OTHER; note = 2'-fluoro cytidine
  modified_base 14: mod_base = OTHER; note = 2'O-methyl cytidine
  modified_base 15: mod_base = OTHER; note = 2'-fluoro guanosine
  modified_base 16: mod_base = OTHER; note = 2'O-methyl uridine
  modified_base 17: mod_base = OTHER; note = 2'-fluoro guanosine
  modified_base 18: mod_base = OTHER; note = 2'O-methyl uridine
  modified_base 19: mod_base = OTHER; note = 2'-fluoro cytidine
  modified_base 20: mod_base = OTHER; note = 2'O-methyl cytidine phosphorothioate
  modified_base 21: mod_base = OTHER; note = 2'-fluoro cytidine
aaacaaccatcaccgtgtccc

SEQ ID NO: 1275 - RNA, 21 nt, synthetic construct
  source 1..21: mol_type = other RNA
  modified_base 1: mod_base = OTHER; note = 2'-fluoro adenosine phosphorothioate
  modified_base 2: mod_base = OTHER; note = 2'O-methyl adenosine phosphorothioate
  modified_base 3: mod_base = OTHER; note = 2'-fluoro cytidine
  modified_base 4: mod_base = OTHER; note = 2'O-methyl adenosine
  modified_base 5: mod_base = OTHER; note = 2'-fluoro adenosine
  modified_base 6: mod_base = OTHER; note = 2'O-methyl cytidine
  modified_base 7: mod_base = OTHER; note = 2'-fluoro cytidine
  modified_base 8: mod_base = OTHER; note = 2'O-methyl adenosine
  modified_base 9: mod_base = OTHER; note = 2'-fluoro uridine
  modified_base 10: mod_base = OTHER; note = 2'O-methyl cytidine
  modified_base 11: mod_base = OTHER; note = 2'-fluoro adenosine
  modified_base 12: mod_base = OTHER; note = 2'O-methyl cytidine
  modified_base 13: mod_base = OTHER; note = 2'-fluoro cytidine
  modified_base 14: mod_base = OTHER; note = 2'O-methyl guanosine
  modified_base 15: mod_base = OTHER; note = 2'-fluoro uridine
  modified_base 16: mod_base = OTHER; note = 2'O-methyl guanosine
  modified_base 17: mod_base = OTHER; note = 2'-fluoro uridine
  modified_base 18: mod_base = OTHER; note = 2'O-methyl cytidine
  modified_base 19: mod_base = OTHER; note = 2'-fluoro cytidine
  modified_base 20: mod_base = OTHER; note = 2'O-methyl cytidine phosphorothioate
  modified_base 21: mod_base = OTHER; note = 2'-fluoro cytidine
aacaaccatcaccgtgtcccc

SEQ ID NO: 1276 - RNA, 21 nt, synthetic construct
  source 1..21: mol_type = other RNA
  modified_base 1: mod_base = OTHER; note = 2'-fluoro adenosine phosphorothioate
  modified_base 2: mod_base = OTHER; note = 2'O-methyl cytidine phosphorothioate
  modified_base 3: mod_base = OTHER; note = 2'-fluoro adenosine
  modified_base 4: mod_base = OTHER; note = 2'O-methyl adenosine
  modified_base 5: mod_base = OTHER; note = 2'-fluoro cytidine
  modified_base 6: mod_base = OTHER; note = 2'O-methyl cytidine
  modified_base 7: mod_base = OTHER; note = 2'-fluoro adenosine
  modified_base 8: mod_base = OTHER; note = 2'O-methyl uridine
  modified_base 9: mod_base = OTHER; note = 2'-fluoro cytidine
  modified_base 10: mod_base = OTHER; note = 2'O-methyl adenosine
  modified_base 11: mod_base = OTHER; note = 2'-fluoro cytidine
  modified_base 12: mod_base = OTHER; note = 2'O-methyl cytidine
  modified_base 13: mod_base = OTHER; note = 2'-fluoro guanosine
  modified_base 14: mod_base = OTHER; note = 2'O-methyl uridine
  modified_base 15: mod_base = OTHER; note = 2'-fluoro guanosine
  modified_base 16: mod_base = OTHER; note = 2'O-methyl uridine
  modified_base 17: mod_base = OTHER; note = 2'-fluoro cytidine
  modified_base 18: mod_base = OTHER; note = 2'O-methyl cytidine
  modified_base 19: mod_base = OTHER; note = 2'-fluoro cytidine
  modified_base 20: mod_base = OTHER; note = 2'O-methyl cytidine phosphorothioate
  modified_base 21: mod_base = OTHER; note = 2'-fluoro cytidine
acaaccatcaccgtgtccccc

SEQ ID NO: 1277 - RNA, 21 nt, synthetic construct
  source 1..21: mol_type = other RNA
  modified_base 1: mod_base = OTHER; note = 2'-fluoro cytidine phosphorothioate
  modified_base 2: mod_base = OTHER; note = 2'O-methyl adenosine phosphorothioate
  modified_base 3: mod_base = OTHER; note = 2'-fluoro adenosine
  modified_base 4: mod_base = OTHER; note = 2'O-methyl cytidine
  modified_base 5: mod_base = OTHER; note = 2'-fluoro cytidine
  modified_base 6: mod_base = OTHER; note = 2'O-methyl adenosine
  modified_base 7: mod_base = OTHER; note = 2'-fluoro uridine
  modified_base 8: mod_base = OTHER; note = 2'O-methyl cytidine
  modified_base 9: mod_base = OTHER; note = 2'-fluoro adenosine
  modified_base 10: mod_base = OTHER; note = 2'O-methyl cytidine
  modified_base 11: mod_base = OTHER; note = 2'-fluoro cytidine
  modified_base 12: mod_base = OTHER; note = 2'O-methyl guanosine
  modified_base 13: mod_base = OTHER; note = 2'-fluoro uridine
  modified_base 14: mod_base = OTHER; note = 2'O-methyl guanosine
  modified_base 15: mod_base = OTHER; note = 2'-fluoro uridine
  modified_base 16: mod_base = OTHER; note = 2'O-methyl cytidine
  modified_base 17: mod_base = OTHER; note = 2'-fluoro cytidine
  modified_base 18: mod_base = OTHER; note = 2'O-methyl cytidine
  modified_base 19: mod_base = OTHER; note = 2'-fluoro cytidine
  modified_base 20: mod_base = OTHER; note = 2'O-methyl cytidine phosphorothioate
  modified_base 21: mod_base = OTHER; note = 2'-fluoro uridine
caaccatcaccgtgtccccct

SEQ ID NO: 1278 - RNA, 21 nt, synthetic construct
  source 1..21: mol_type = other RNA
  modified_base 1: mod_base = OTHER; note = 2'-fluoro adenosine phosphorothioate
  modified_base 2: mod_base = OTHER; note = 2'O-methyl uridine phosphorothioate
  modified_base 3: mod_base = OTHER; note = 2'-fluoro cytidine
  modified_base 4: mod_base = OTHER; note = 2'O-methyl adenosine
  modified_base 5: mod_base = OTHER; note = 2'-fluoro cytidine
  modified_base 6: mod_base = OTHER; note = 2'O-methyl cytidine
  modified_base 7: mod_base = OTHER; note = 2'-fluoro guanosine
  modified_base 8: mod_base = OTHER; note = 2'O-methyl uridine
  modified_base 9: mod_base = OTHER; note = 2'-fluoro guanosine
  modified_base 10: mod_base = OTHER; note = 2'O-methyl uridine
  modified_base 11: mod_base = OTHER; note = 2'-fluoro cytidine
  modified_base 12: mod_base = OTHER; note = 2'O-methyl cytidine
  modified_base 13: mod_base = OTHER; note = 2'-fluoro cytidine
  modified_base 14: mod_base = OTHER; note = 2'O-methyl cytidine
  modified_base 15: mod_base = OTHER; note = 2'-fluoro cytidine
  modified_base 16: mod_base = OTHER; note = 2'O-methyl uridine
  modified_base 17: mod_base = OTHER; note = 2'-fluoro uridine
  modified_base 18: mod_base = OTHER; note = 2'O-methyl cytidine
  modified_base 19: mod_base = OTHER; note = 2'-fluoro uridine
  modified_base 20: mod_base = OTHER; note = 2'O-methyl adenosine phosphorothioate
  modified_base 21: mod_base = OTHER; note = 2'-fluoro uridine
atcaccgtgtcccccttctat

SEQ ID NO: 1279 - RNA, 21 nt, synthetic construct
  source 1..21: mol_type = other RNA
  modified_base 1: mod_base = OTHER; note = 2'-fluoro uridine phosphorothioate
  modified_base 2: mod_base = OTHER; note = 2'O-methyl cytidine phosphorothioate
  modified_base 3: mod_base = OTHER; note = 2'-fluoro adenosine
  modified_base 4: mod_base = OTHER; note = 2'O-methyl cytidine
  modified_base 5: mod_base = OTHER; note = 2'-fluoro cytidine
  modified_base 6: mod_base = OTHER; note = 2'O-methyl guanosine
  modified_base 7: mod_base = OTHER; note = 2'-fluoro uridine
  modified_base 8: mod_base = OTHER; note = 2'O-methyl guanosine
  modified_base 9: mod_base = OTHER; note = 2'-fluoro uridine
  modified_base 10: mod_base = OTHER; note = 2'O-methyl cytidine
  modified_base 11: mod_base = OTHER; note = 2'-fluoro cytidine
  modified_base 12: mod_base = OTHER; note = 2'O-methyl cytidine
  modified_base 13: mod_base = OTHER; note = 2'-fluoro cytidine
  modified_base 14: mod_base = OTHER; note = 2'O-methyl cytidine
  modified_base 15: mod_base = OTHER; note = 2'-fluoro uridine
  modified_base 16: mod_base = OTHER; note = 2'O-methyl uridine
  modified_base 17: mod_base = OTHER; note = 2'-fluoro cytidine
  modified_base 18: mod_base = OTHER; note = 2'O-methyl uridine
  modified_base 19: mod_base = OTHER; note = 2'-fluoro adenosine
  modified_base 20: mod_base = OTHER; note = 2'O-methyl uridine phosphorothioate
  modified_base 21: mod_base = OTHER; note = 2'-fluoro guanosine
tcaccgtgtcccccttctatg

SEQ ID NO: 1280 - RNA, 21 nt, synthetic construct
  source 1..21: mol_type = other RNA
  modified_base 1: mod_base = OTHER; note = 2'-fluoro cytidine phosphorothioate
  modified_base 2: mod_base = OTHER; note = 2'O-methyl adenosine phosphorothioate
  modified_base 3: mod_base = OTHER; note = 2'-fluoro cytidine
  modified_base 4: mod_base = OTHER; note = 2'O-methyl cytidine
  modified_base 5: mod_base = OTHER; note = 2'-fluoro guanosine
  modified_base 6: mod_base = OTHER; note = 2'O-methyl uridine
  modified_base 7: mod_base = OTHER; note = 2'-fluoro guanosine
  modified_base 8: mod_base = OTHER; note = 2'O-methyl uridine
  modified_base 9: mod_base = OTHER; note = 2'-fluoro cytidine
  modified_base 10: mod_base = OTHER; note = 2'O-methyl cytidine
  modified_base 11: mod_base = OTHER; note = 2'-fluoro cytidine
  modified_base 12: mod_base = OTHER; note = 2'O-methyl cytidine
  modified_base 13: mod_base = OTHER; note = 2'-fluoro cytidine
  modified_base 14: mod_base = OTHER; note = 2'O-methyl uridine
  modified_base 15: mod_base = OTHER; note = 2'-fluoro uridine
  modified_base 16: mod_base = OTHER; note = 2'O-methyl cytidine
  modified_base 17: mod_base = OTHER; note = 2'-fluoro uridine
  modified_base 18: mod_base = OTHER; note = 2'O-methyl adenosine
  modified_base 19: mod_base = OTHER; note = 2'-fluoro uridine
  modified_base 20: mod_base = OTHER; note = 2'O-methyl guanosine phosphorothioate
  modified_base 21: mod_base = OTHER; note = 2'-fluoro guanosine
caccgtgtcccccttctatgg

SEQ ID NO: 1281 - RNA, 21 nt, synthetic construct
  source 1..21: mol_type = other RNA
  modified_base 1: mod_base = OTHER; note = 2'-fluoro adenosine phosphorothioate
  modified_base 2: mod_base = OTHER; note = 2'O-methyl cytidine phosphorothioate
  modified_base 3: mod_base = OTHER; note = 2'-fluoro cytidine
  modified_base 4: mod_base = OTHER; note = 2'O-methyl guanosine
  modified_base 5: mod_base = OTHER; note = 2'-fluoro uridine
  modified_base 6: mod_base = OTHER; note = 2'O-methyl guanosine
  modified_base 7: mod_base = OTHER; note = 2'-fluoro uridine
  modified_base 8: mod_base = OTHER; note = 2'O-methyl cytidine
  modified_base 9: mod_base = OTHER; note = 2'-fluoro cytidine
  modified_base 10: mod_base = OTHER; note = 2'O-methyl cytidine
  modified_base 11: mod_base = OTHER; note = 2'-fluoro cytidine
  modified_base 12: mod_base = OTHER; note = 2'O-methyl cytidine
  modified_base 13: mod_base = OTHER; note = 2'-fluoro uridine
  modified_base 14: mod_base = OTHER; note = 2'O-methyl uridine
  modified_base 15: mod_base = OTHER; note = 2'-fluoro cytidine
  modified_base 16: mod_base = OTHER; note = 2'O-methyl uridine
  modified_base 17: mod_base = OTHER; note = 2'-fluoro adenosine
  modified_base 18: mod_base = OTHER; note = 2'O-methyl uridine
  modified_base 19: mod_base = OTHER; note = 2'-fluoro guanosine
  modified_base 20: mod_base = OTHER; note = 2'O-methyl guanosine phosphorothioate
  modified_base 21: mod_base = OTHER; note = 2'-fluoro guanosine
accgtgtcccccttctatggg

SEQ ID NO: 1282 - RNA, 21 nt, synthetic construct
  source 1..21: mol_type = other RNA
  modified_base 1: mod_base = OTHER; note = 2'-fluoro guanosine phosphorothioate
  modified_base 2: mod_base = OTHER; note = 2'O-methyl uridine phosphorothioate
  modified_base 3: mod_base = OTHER; note = 2'-fluoro guanosine
  modified_base 4: mod_base = OTHER; note = 2'O-methyl uridine
  modified_base 5: mod_base = OTHER; note = 2'-fluoro cytidine
  modified_base 6: mod_base = OTHER; note = 2'O-methyl cytidine
  modified_base 7: mod_base = OTHER; note = 2'-fluoro cytidine
  modified_base 8: mod_base = OTHER; note = 2'O-methyl cytidine
  modified_base 9: mod_base = OTHER; note = 2'-fluoro cytidine
  modified_base 10: mod_base = OTHER; note = 2'O-methyl uridine
  modified_base 11: mod_base = OTHER; note = 2'-fluoro uridine
  modified_base 12: mod_base = OTHER; note = 2'O-methyl cytidine
  modified_base 13: mod_base = OTHER; note = 2'-fluoro uridine
  modified_base 14: mod_base = OTHER; note = 2'O-methyl adenosine
  modified_base 15: mod_base = OTHER; note = 2'-fluoro uridine
  modified_base 16: mod_base = OTHER; note = 2'O-methyl guanosine
  modified_base 17: mod_base = OTHER; note = 2'-fluoro guanosine
  modified_base 18: mod_base = OTHER; note = 2'O-methyl guanosine
  modified_base 19: mod_base = OTHER; note = 2'-fluoro guanosine
  modified_base 20: mod_base = OTHER; note = 2'O-methyl adenosine phosphorothioate
  modified_base 21: mod_base = OTHER; note = 2'-fluoro guanosine
gtgtcccccttctatggggag

SEQ ID NO: 1283 - RNA, 21 nt, synthetic construct
  source 1..21: mol_type = other RNA
  modified_base 1: mod_base = OTHER; note = 2'-fluoro uridine phosphorothioate
  modified_base 2: mod_base = OTHER; note = 2'O-methyl guanosine phosphorothioate
  modified_base 3: mod_base = OTHER; note = 2'-fluoro uridine
  modified_base 4: mod_base = OTHER; note = 2'O-methyl cytidine
  modified_base 5: mod_base = OTHER; note = 2'-fluoro cytidine
  modified_base 6: mod_base = OTHER; note = 2'O-methyl cytidine
  modified_base 7: mod_base = OTHER; note = 2'-fluoro cytidine
  modified_base 8: mod_base = OTHER; note = 2'O-methyl cytidine
  modified_base 9: mod_base = OTHER; note = 2'-fluoro uridine
  modified_base 10: mod_base = OTHER; note = 2'O-methyl uridine
  modified_base 11: mod_base = OTHER; note = 2'-fluoro cytidine
  modified_base 12: mod_base = OTHER; note = 2'O-methyl uridine
  modified_base 13: mod_base = OTHER; note = 2'-fluoro adenosine
  modified_base 14: mod_base = OTHER; note = 2'O-methyl uridine
  modified_base 15: mod_base = OTHER; note = 2'-fluoro guanosine
  modified_base 16: mod_base = OTHER; note = 2'O-methyl guanosine
  modified_base 17: mod_base = OTHER; note = 2'-fluoro guanosine
  modified_base 18: mod_base = OTHER; note = 2'O-methyl guanosine
  modified_base 19: mod_base = OTHER; note = 2'-fluoro adenosine
  modified_base 20: mod_base = OTHER; note = 2'O-methyl guanosine phosphorothioate
  modified_base 21: mod_base = OTHER; note = 2'-fluoro uridine
tgtcccccttctatggggagt

SEQ ID NO: 1284 - RNA, 21 nt, synthetic construct
  source 1..21: mol_type = other RNA
  modified_base 1: mod_base = OTHER; note = 2'-fluoro guanosine phosphorothioate
  modified_base 2: mod_base = OTHER; note = 2'O-methyl uridine phosphorothioate
  modified_base 3: mod_base = OTHER; note = 2'-fluoro cytidine
  modified_base 4: mod_base = OTHER; note = 2'O-methyl cytidine
  modified_base 5: mod_base = OTHER; note = 2'-fluoro cytidine
  modified_base 6: mod_base = OTHER; note = 2'O-methyl cytidine
  modified_base 7: mod_base = OTHER; note = 2'-fluoro cytidine
  modified_base 8: mod_base = OTHER; note = 2'O-methyl uridine
  modified_base 9: mod_base = OTHER; note = 2'-fluoro uridine
  modified_base 10: mod_base = OTHER; note = 2'O-methyl cytidine
  modified_base 11: mod_base = OTHER; note = 2'-fluoro uridine
  modified_base 12: mod_base = OTHER; note = 2'O-methyl adenosine
  modified_base 13: mod_base = OTHER; note = 2'-fluoro uridine
  modified_base 14: mod_base = OTHER; note = 2'O-methyl guanosine
  modified_base 15: mod_base = OTHER; note = 2'-fluoro guanosine
  modified_base 16: mod_base = OTHER; note = 2'O-methyl guanosine
  modified_base 17: mod_base = OTHER; note = 2'-fluoro guanosine
  modified_base 18: mod_base = OTHER; note = 2'O-methyl adenosine
  modified_base 19: mod_base = OTHER; note = 2'-fluoro guanosine
  modified_base 20: mod_base = OTHER; note = 2'O-methyl uridine phosphorothioate
  modified_base 21: mod_base = OTHER; note = 2'-fluoro adenosine
gtcccccttctatggggagta

SEQ ID NO: 1285 - RNA, 21 nt, synthetic construct
  source 1..21: mol_type = other RNA
  modified_base 1: mod_base = OTHER; note = 2'-fluoro uridine phosphorothioate
  modified_base 2: mod_base = OTHER; note = 2'O-methyl cytidine phosphorothioate
  modified_base 3: mod_base = OTHER; note = 2'-fluoro cytidine
  modified_base 4: mod_base = OTHER; note = 2'O-methyl cytidine
  modified_base 5: mod_base = OTHER; note = 2'-fluoro cytidine
  modified_base 6: mod_base = OTHER; note = 2'O-methyl cytidine
  modified_base 7: mod_base = OTHER; note = 2'-fluoro uridine
  modified_base 8: mod_base = OTHER; note = 2'O-methyl uridine
  modified_base 9: mod_base = OTHER; note = 2'-fluoro cytidine
  modified_base 10: mod_base = OTHER; note = 2'O-methyl uridine
  modified_base 11: mod_base = OTHER; note = 2'-fluoro adenosine
  modified_base 12: mod_base = OTHER; note = 2'O-methyl uridine
  modified_base 13: mod_base = OTHER; note = 2'-fluoro guanosine
  modified_base 14: mod_base = OTHER; note = 2'O-methyl guanosine
  modified_base 15: mod_base = OTHER; note = 2'-fluoro guanosine
  modified_base 16: mod_base = OTHER; note = 2'O-methyl guanosine
  modified_base 17: mod_base = OTHER; note = 2'-fluoro adenosine
  modified_base 18: mod_base = OTHER; note = 2'O-methyl guanosine
  modified_base 19: mod_base = OTHER; note = 2'-fluoro uridine
  modified_base 20: mod_base = OTHER; note = 2'O-methyl adenosine phosphorothioate
  modified_base 21: mod_base = OTHER; note = 2'-fluoro cytidine
tcccccttctatggggagtac

SEQ ID NO: 1286 - RNA, 21 nt, synthetic construct
  source 1..21: mol_type = other RNA
  modified_base 1: mod_base = OTHER; note = 2'-fluoro cytidine phosphorothioate
  modified_base 2: mod_base = OTHER; note = 2'O-methyl cytidine phosphorothioate
  modified_base 3: mod_base = OTHER; note = 2'-fluoro cytidine
  modified_base 4: mod_base = OTHER; note = 2'O-methyl uridine
  modified_base 5: mod_base = OTHER; note = 2'-fluoro uridine
  modified_base 6: mod_base = OTHER; note = 2'O-methyl cytidine
  modified_base 7: mod_base = OTHER; note = 2'-fluoro uridine
  modified_base 8: mod_base = OTHER; note = 2'O-methyl adenosine
  modified_base 9: mod_base = OTHER; note = 2'-fluoro uridine
  modified_base 10: mod_base = OTHER; note = 2'O-methyl guanosine
  modified_base 11: mod_base = OTHER; note = 2'-fluoro guanosine
  modified_base 12: mod_base = OTHER; note = 2'O-methyl guanosine
  modified_base 13: mod_base = OTHER; note = 2'-fluoro guanosine
  modified_base 14: mod_base = OTHER; note = 2'O-methyl adenosine
  modified_base 15: mod_base = OTHER; note = 2'-fluoro guanosine
  modified_base 16: mod_base = OTHER; note = 2'O-methyl uridine
  modified_base 17: mod_base = OTHER; note = 2'-fluoro adenosine
  modified_base 18: mod_base = OTHER; note = 2'O-methyl cytidine
  modified_base 19: mod_base = OTHER; note = 2'-fluoro guanosine
  modified_base 20: mod_base = OTHER; note = 2'O-methyl adenosine phosphorothioate
  modified_base 21: mod_base = OTHER; note = 2'-fluoro cytidine
cccttctatggggagtacgac

SEQ ID NO: 1287 - RNA, 21 nt, synthetic construct
  source 1..21: mol_type = other RNA
  modified_base 1: mod_base = OTHER; note = 2'-fluoro cytidine phosphorothioate
  modified_base 2: mod_base = OTHER; note = 2'O-methyl cytidine phosphorothioate
  modified_base 3: mod_base = OTHER; note = 2'-fluoro uridine
  modified_base 4: mod_base = OTHER; note = 2'O-methyl uridine
  modified_base 5: mod_base = OTHER; note = 2'-fluoro cytidine
  modified_base 6: mod_base = OTHER; note = 2'O-methyl uridine
  modified_base 7: mod_base = OTHER; note = 2'-fluoro adenosine
  modified_base 8: mod_base = OTHER; note = 2'O-methyl uridine
  modified_base 9: mod_base = OTHER; note = 2'-fluoro guanosine
  modified_base 10: mod_base = OTHER; note = 2'O-methyl guanosine
  modified_base 11: mod_base = OTHER; note = 2'-fluoro guanosine
  modified_base 12: mod_base = OTHER; note = 2'O-methyl guanosine
  modified_base 13: mod_base = OTHER; note = 2'-fluoro adenosine
  modified_base 14: mod_base = OTHER; note = 2'O-methyl guanosine
  modified_base 15: mod_base = OTHER; note = 2'-fluoro uridine
  modified_base 16: mod_base = OTHER; note = 2'O-methyl adenosine
  modified_base 17: mod_base = OTHER; note = 2'-fluoro cytidine
  modified_base 18: mod_base = OTHER; note = 2'O-methyl guanosine
  modified_base 19: mod_base = OTHER; note = 2'-fluoro adenosine
  modified_base 20: mod_base = OTHER; note = 2'O-methyl cytidine phosphorothioate
  modified_base 21: mod_base = OTHER; note = 2'-fluoro adenosine
ccttctatggggagtacgaca

SEQ ID NO: 1288 - RNA, 21 nt, synthetic construct
  source 1..21: mol_type = other RNA
  modified_base 1: mod_base = OTHER; note = 2'-fluoro uridine phosphorothioate
  modified_base 2: mod_base = OTHER; note = 2'O-methyl uridine phosphorothioate
  modified_base 3: mod_base = OTHER; note = 2'-fluoro cytidine
  modified_base 4: mod_base = OTHER; note = 2'O-methyl uridine
  modified_base 5: mod_base = OTHER; note = 2'-fluoro adenosine
  modified_base 6: mod_base = OTHER; note = 2'O-methyl uridine
  modified_base 7: mod_base = OTHER; note = 2'-fluoro guanosine
  modified_base 8: mod_base = OTHER; note = 2'O-methyl guanosine
  modified_base 9: mod_base = OTHER; note = 2'-fluoro guanosine
  modified_base 10: mod_base = OTHER; note = 2'O-methyl guanosine
  modified_base 11: mod_base = OTHER; note = 2'-fluoro adenosine
  modified_base 12: mod_base = OTHER; note = 2'O-methyl guanosine
  modified_base 13: mod_base = OTHER; note = 2'-fluoro uridine
  modified_base 14: mod_base = OTHER; note = 2'O-methyl adenosine
  modified_base 15: mod_base = OTHER; note = 2'-fluoro cytidine
  modified_base 16: mod_base = OTHER; note = 2'O-methyl guanosine
  modified_base 17: mod_base = OTHER; note = 2'-fluoro adenosine
  modified_base 18: mod_base = OTHER; note = 2'O-methyl cytidine
  modified_base 19: mod_base = OTHER; note = 2'-fluoro adenosine
  modified_base 20: mod_base = OTHER; note = 2'O-methyl uridine phosphorothioate
  modified_base 21: mod_base = OTHER; note = 2'-fluoro cytidine
ttctatggggagtacgacatc

SEQ ID NO: 1289 - RNA, 21 nt, synthetic construct
  source 1..21: mol_type = other RNA
  modified_base 1: mod_base = OTHER; note = 2'-fluoro uridine phosphorothioate
  modified_base 2: mod_base = OTHER; note = 2'O-methyl cytidine phosphorothioate
  modified_base 3: mod_base = OTHER; note = 2'-fluoro uridine
  modified_base 4: mod_base = OTHER; note = 2'O-methyl adenosine
  modified_base 5: mod_base = OTHER; note = 2'-fluoro uridine
  modified_base 6: mod_base = OTHER; note = 2'O-methyl guanosine
  modified_base 7: mod_base = OTHER; note = 2'-fluoro guanosine
  modified_base 8: mod_base = OTHER; note = 2'O-methyl guanosine
  modified_base 9: mod_base = OTHER; note = 2'-fluoro guanosine
  modified_base 10: mod_base = OTHER; note = 2'O-methyl adenosine
  modified_base 11: mod_base = OTHER; note = 2'-fluoro guanosine
  modified_base 12: mod_base = OTHER; note = 2'O-methyl uridine
  modified_base 13: mod_base = OTHER; note = 2'-fluoro adenosine
  modified_base 14: mod_base = OTHER; note = 2'O-methyl cytidine
  modified_base 15: mod_base = OTHER; note = 2'-fluoro guanosine
  modified_base 16: mod_base = OTHER; note = 2'O-methyl adenosine
  modified_base 17: mod_base = OTHER; note = 2'-fluoro cytidine
  modified_base 18: mod_base = OTHER; note = 2'O-methyl adenosine
  modified_base 19: mod_base = OTHER; note = 2'-fluoro uridine
  modified_base 20: mod_base = OTHER; note = 2'O-methyl cytidine phosphorothioate
  modified_base 21: mod_base = OTHER; note = 2'-fluoro uridine
tctatggggagtacgacatct

SEQ ID NO: 1290 - RNA, 21 nt, synthetic construct
  source 1..21: mol_type = other RNA
  modified_base 1: mod_base = OTHER; note = 2'-fluoro cytidine phosphorothioate
  modified_base 2: mod_base = OTHER; note = 2'O-methyl uridine phosphorothioate
  modified_base 3: mod_base = OTHER; note = 2'-fluoro adenosine
  modified_base 4: mod_base = OTHER; note = 2'O-methyl uridine
  modified_base 5: mod_base = OTHER; note = 2'-fluoro guanosine
  modified_base 6: mod_base = OTHER; note = 2'O-methyl guanosine
  modified_base 7: mod_base = OTHER; note = 2'-fluoro guanosine
  modified_base 8: mod_base = OTHER; note = 2'O-methyl guanosine
  modified_base 9: mod_base = OTHER; note = 2'-fluoro adenosine
  modified_base 10: mod_base = OTHER; note = 2'O-methyl guanosine
  modified_base 11: mod_base = OTHER; note = 2'-fluoro uridine
  modified_base 12: mod_base = OTHER; note = 2'O-methyl adenosine
  modified_base 13: mod_base = OTHER; note = 2'-fluoro cytidine
  modified_base 14: mod_base = OTHER; note = 2'O-methyl guanosine
  modified_base 15: mod_base = OTHER; note = 2'-fluoro adenosine
  modified_base 16: mod_base = OTHER; note = 2'O-methyl cytidine
  modified_base 17: mod_base = OTHER; note = 2'-fluoro adenosine
  modified_base 18: mod_base = OTHER; note = 2'O-methyl uridine
  modified_base 19: mod_base = OTHER; note = 2'-fluoro cytidine
  modified_base 20: mod_base = OTHER; note = 2'O-methyl uridine phosphorothioate
  modified_base 21: mod_base = OTHER; note = 2'-fluoro guanosine
ctatggggagtacgacatctg

SEQ ID NO: 1291 - RNA, 21 nt, synthetic construct
  source 1..21: mol_type = other RNA
  modified_base 1: mod_base = OTHER; note = 2'-fluoro uridine phosphorothioate
  modified_base 2: mod_base = OTHER; note = 2'O-methyl adenosine phosphorothioate
  modified_base 3: mod_base = OTHER; note = 2'-fluoro uridine
  modified_base 4: mod_base = OTHER; note = 2'O-methyl guanosine
  modified_base 5: mod_base = OTHER; note = 2'-fluoro guanosine
  modified_base 6: mod_base = OTHER; note = 2'O-methyl guanosine
  modified_base 7: mod_base = OTHER; note = 2'-fluoro guanosine
  modified_base 8: mod_base = OTHER; note = 2'O-methyl adenosine
  modified_base 9: mod_base = OTHER; note = 2'-fluoro guanosine
  modified_base 10: mod_base = OTHER; note = 2'O-methyl uridine
  modified_base 11: mod_base = OTHER; note = 2'-fluoro adenosine
  modified_base 12: mod_base = OTHER; note = 2'O-methyl cytidine
  modified_base 13: mod_base = OTHER; note = 2'-fluoro guanosine
  modified_base 14: mod_base = OTHER; note = 2'O-methyl adenosine
  modified_base 15: mod_base = OTHER; note = 2'-fluoro cytidine
  modified_base 16: mod_base = OTHER; note = 2'O-methyl adenosine
  modified_base 17: mod_base = OTHER; note = 2'-fluoro uridine
  modified_base 18: mod_base = OTHER; note = 2'O-methyl cytidine
  modified_base 19: mod_base = OTHER; note = 2'-fluoro uridine
  modified_base 20: mod_base = OTHER; note = 2'O-methyl guanosine phosphorothioate
  modified_base 21: mod_base = OTHER; note = 2'-fluoro cytidine
tatggggagtacgacatctgc

SEQ ID NO: 1292 - RNA, 21 nt, synthetic construct
  source 1..21: mol_type = other RNA
  modified_base 1: mod_base = OTHER; note = 2'-fluoro adenosine phosphorothioate
  modified_base 2: mod_base = OTHER; note = 2'O-methyl cytidine phosphorothioate
  modified_base 3: mod_base = OTHER; note = 2'-fluoro guanosine
  modified_base 4: mod_base = OTHER; note = 2'O-methyl adenosine
  modified_base 5: mod_base = OTHER; note = 2'-fluoro cytidine
  modified_base 6: mod_base = OTHER; note = 2'O-methyl adenosine
  modified_base 7: mod_base = OTHER; note = 2'-fluoro uridine
  modified_base 8: mod_base = OTHER; note = 2'O-methyl cytidine
  modified_base 9: mod_base = OTHER; note = 2'-fluoro uridine
  modified_base 10: mod_base = OTHER; note = 2'O-methyl guanosine
  modified_base 11: mod_base = OTHER; note = 2'-fluoro cytidine
  modified_base 12: mod_base = OTHER; note = 2'O-methyl cytidine
  modified_base 13: mod_base = OTHER; note = 2'-fluoro cytidine
  modified_base 14: mod_base = OTHER; note = 2'O-methyl uridine
  modified_base 15: mod_base = OTHER; note = 2'-fluoro adenosine
  modified_base 16: mod_base = OTHER; note = 2'O-methyl adenosine
  modified_base 17: mod_base = OTHER; note = 2'-fluoro adenosine
  modified_base 18: mod_base = OTHER; note = 2'O-methyl guanosine
  modified_base 19: mod_base = OTHER; note = 2'-fluoro uridine
  modified_base 20: mod_base = OTHER; note = 2'O-methyl cytidine phosphorothioate
  modified_base 21: mod_base = OTHER; note = 2'-fluoro adenosine
acgacatctgccctaaagtca

SEQ ID NO: 1293 - RNA, 21 nt, synthetic construct
  source 1..21: mol_type = other RNA
  modified_base 1: mod_base = OTHER; note = 2'-fluoro cytidine phosphorothioate
  modified_base 2: mod_base = OTHER; note = 2'O-methyl guanosine phosphorothioate
  modified_base 3: mod_base = OTHER; note = 2'-fluoro adenosine
  modified_base 4: mod_base = OTHER; note = 2'O-methyl cytidine
  modified_base 5: mod_base = OTHER; note = 2'-fluoro adenosine
  modified_base 6: mod_base = OTHER; note = 2'O-methyl uridine
  modified_base 7: mod_base = OTHER; note = 2'-fluoro cytidine
  modified_base 8: mod_base = OTHER; note = 2'O-methyl uridine
  modified_base 9: mod_base = OTHER; note = 2'-fluoro guanosine
  modified_base 10: mod_base = OTHER; note = 2'O-methyl cytidine
  modified_base 11: mod_base = OTHER; note = 2'-fluoro cytidine
  modified_base 12: mod_base = OTHER; note = 2'O-methyl cytidine
  modified_base 13: mod_base = OTHER; note = 2'-fluoro uridine
  modified_base 14: mod_base = OTHER; note = 2'O-methyl adenosine
  modified_base 15: mod_base = OTHER; note = 2'-fluoro adenosine
  modified_base 16: mod_base = OTHER; note = 2'O-methyl adenosine
  modified_base 17: mod_base = OTHER; note = 2'-fluoro guanosine
  modified_base 18: mod_base = OTHER; note = 2'O-methyl uridine
  modified_base 19: mod_base = OTHER; note = 2'-fluoro cytidine
  modified_base 20: mod_base = OTHER; note = 2'O-methyl adenosine phosphorothioate
  modified_base 21: mod_base = OTHER; note = 2'-fluoro adenosine
cgacatctgccctaaagtcaa

SEQ ID NO: 1294 - RNA, 21 nt, synthetic construct
  source 1..21: mol_type = other RNA
  modified_base 1: mod_base = OTHER; note = 2'-fluoro guanosine phosphorothioate
  modified_base 2: mod_base = OTHER; note = 2'O-methyl adenosine phosphorothioate
  modified_base 3: mod_base = OTHER; note = 2'-fluoro cytidine
  modified_base 4: mod_base = OTHER; note = 2'O-methyl adenosine
  modified_base 5: mod_base = OTHER; note = 2'-fluoro uridine
  modified_base 6: mod_base = OTHER; note = 2'O-methyl cytidine
  modified_base 7: mod_base = OTHER; note = 2'-fluoro uridine
  modified_base 8: mod_base = OTHER; note = 2'O-methyl guanosine
  modified_base 9: mod_base = OTHER; note = 2'-fluoro cytidine
  modified_base 10: mod_base = OTHER; note = 2'O-methyl cytidine
  modified_base 11: mod_base = OTHER; note = 2'-fluoro cytidine
  modified_base 12: mod_base = OTHER; note = 2'O-methyl uridine
  modified_base 13: mod_base = OTHER; note = 2'-fluoro adenosine
  modified_base 14: mod_base = OTHER; note = 2'O-methyl adenosine
  modified_base 15: mod_base = OTHER; note = 2'-fluoro adenosine
  modified_base 16: mod_base = OTHER; note = 2'O-methyl guanosine
  modified_base 17: mod_base = OTHER; note = 2'-fluoro uridine
  modified_base 18: mod_base = OTHER; note = 2'O-methyl cytidine
  modified_base 19: mod_base = OTHER; note = 2'-fluoro adenosine
  modified_base 20: mod_base = OTHER; note = 2'O-methyl adenosine phosphorothioate
  modified_base 21: mod_base = OTHER; note = 2'-fluoro guanosine
gacatctgccctaaagtcaag

SEQ ID NO: 1295 - RNA, 21 nt, synthetic construct
  source 1..21: mol_type = other RNA
  modified_base 1: mod_base = OTHER; note = 2'-fluoro adenosine phosphorothioate
  modified_base 2: mod_base = OTHER; note = 2'O-methyl cytidine phosphorothioate
  modified_base 3: mod_base = OTHER; note = 2'-fluoro adenosine
  modified_base 4: mod_base = OTHER; note = 2'O-methyl uridine
  modified_base 5: mod_base = OTHER; note = 2'-fluoro cytidine
  modified_base 6: mod_base = OTHER; note = 2'O-methyl uridine
  modified_base 7: mod_base = OTHER; note = 2'-fluoro guanosine
  modified_base 8: mod_base = OTHER; note = 2'O-methyl cytidine
  modified_base 9: mod_base = OTHER; note = 2'-fluoro cytidine
  modified_base 10: mod_base = OTHER; note = 2'O-methyl cytidine
  modified_base 11: mod_base = OTHER; note = 2'-fluoro uridine
  modified_base 12: mod_base = OTHER; note = 2'O-methyl adenosine
  modified_base 13: mod_base = OTHER; note = 2'-fluoro adenosine
  modified_base 14: mod_base = OTHER; note = 2'O-methyl adenosine
  modified_base 15: mod_base = OTHER; note = 2'-fluoro guanosine
  modified_base 16: mod_base = OTHER; note = 2'O-methyl uridine
  modified_base 17: mod_base = OTHER; note = 2'-fluoro cytidine
  modified_base 18: mod_base = OTHER; note = 2'O-methyl adenosine
  modified_base 19: mod_base = OTHER; note = 2'-fluoro adenosine
  modified_base 20: mod_base = OTHER; note = 2'O-methyl guanosine phosphorothioate
  modified_base 21: mod_base = OTHER; note = 2'-fluoro uridine
acatctgccctaaagtcaagt

SEQ ID NO: 1296 - RNA, 21 nt, synthetic construct
  source 1..21: mol_type = other RNA
  modified_base 1: mod_base = OTHER; note = 2'-fluoro cytidine phosphorothioate
  modified_base 2: mod_base = OTHER; note = 2'O-methyl adenosine phosphorothioate
  modified_base 3: mod_base = OTHER; note = 2'-fluoro uridine
  modified_base 4: mod_base = OTHER; note = 2'O-methyl cytidine
  modified_base 5: mod_base = OTHER; note = 2'-fluoro uridine
  modified_base 6: mod_base = OTHER; note = 2'O-methyl guanosine
  modified_base 7: mod_base = OTHER; note = 2'-fluoro cytidine
  modified_base 8: mod_base = OTHER; note = 2'O-methyl cytidine
  modified_base 9: mod_base = OTHER; note = 2'-fluoro cytidine
  modified_base 10: mod_base = OTHER; note = 2'O-methyl uridine
  modified_base 11: mod_base = OTHER; note = 2'-fluoro adenosine
  modified_base 12: mod_base = OTHER; note = 2'O-methyl adenosine
  modified_base 13: mod_base = OTHER; note = 2'-fluoro adenosine
  modified_base 14: mod_base = OTHER; note = 2'O-methyl guanosine
  modified_base 15: mod_base = OTHER; note = 2'-fluoro uridine
  modified_base 16: mod_base = OTHER; note = 2'O-methyl cytidine
  modified_base 17: mod_base = OTHER; note = 2'-fluoro adenosine
  modified_base 18: mod_base = OTHER; note = 2'O-methyl adenosine
  modified_base 19: mod_base = OTHER; note = 2'-fluoro guanosine
  modified_base 20: mod_base = OTHER; note = 2'O-methyl uridine phosphorothioate
  modified_base 21: mod_base = OTHER; note = 2'-fluoro cytidine
catctgccctaaagtcaagtc

SEQ ID NO: 1297 - RNA, 21 nt, synthetic construct
  source 1..21: mol_type = other RNA
  modified_base 1: mod_base = OTHER; note = 2'-fluoro adenosine phosphorothioate
  modified_base 2: mod_base = OTHER; note = 2'O-methyl uridine phosphorothioate
  modified_base 3: mod_base = OTHER; note = 2'-fluoro cytidine
  modified_base 4: mod_base = OTHER; note = 2'O-methyl uridine
  modified_base 5: mod_base = OTHER; note = 2'-fluoro guanosine
  modified_base 6: mod_base = OTHER; note = 2'O-methyl cytidine
  modified_base 7: mod_base = OTHER; note = 2'-fluoro cytidine
  modified_base 8: mod_base = OTHER; note = 2'O-methyl cytidine
  modified_base 9: mod_base = OTHER; note = 2'-fluoro uridine
  modified_base 10: mod_base = OTHER; note = 2'O-methyl adenosine
  modified_base 11: mod_base = OTHER; note = 2'-fluoro adenosine
  modified_base 12: mod_base = OTHER; note = 2'O-methyl adenosine
  modified_base 13: mod_base = OTHER; note = 2'-fluoro guanosine
  modified_base 14: mod_base = OTHER; note = 2'O-methyl uridine
  modified_base 15: mod_base = OTHER; note = 2'-fluoro cytidine
  modified_base 16: mod_base = OTHER; note = 2'O-methyl adenosine
  modified_base 17: mod_base = OTHER; note = 2'-fluoro adenosine
  modified_base 18: mod_base = OTHER; note = 2'O-methyl guanosine
  modified_base 19: mod_base = OTHER; note = 2'-fluoro uridine
  modified_base 20: mod_base = OTHER; note = 2'O-methyl cytidine phosphorothioate
  modified_base 21: mod_base = OTHER; note = 2'-fluoro cytidine
atctgccctaaagtcaagtcc

SEQ ID NO: 1298 - RNA, 21 nt, synthetic construct
  source 1..21: mol_type = other RNA
  modified_base 1: mod_base = OTHER; note = 2'-fluoro cytidine phosphorothioate
  modified_base 2: mod_base = OTHER; note = 2'O-methyl cytidine phosphorothioate
  modified_base 3: mod_base = OTHER; note = 2'-fluoro cytidine
  modified_base 4: mod_base = OTHER; note = 2'O-methyl uridine
  modified_base 5: mod_base = OTHER; note = 2'-fluoro adenosine
  modified_base 6: mod_base = OTHER; note = 2'O-methyl adenosine
  modified_base 7: mod_base = OTHER; note = 2'-fluoro adenosine
  modified_base 8: mod_base = OTHER; note = 2'O-methyl guanosine
  modified_base 9: mod_base = OTHER; note = 2'-fluoro uridine
  modified_base 10: mod_base = OTHER; note = 2'O-methyl cytidine
  modified_base 11: mod_base = OTHER; note = 2'-fluoro adenosine
  modified_base 12: mod_base = OTHER; note = 2'O-methyl adenosine
  modified_base 13: mod_base = OTHER; note = 2'-fluoro guanosine
  modified_base 14: mod_base = OTHER; note = 2'O-methyl uridine
  modified_base 15: mod_base = OTHER; note = 2'-fluoro cytidine
  modified_base 16: mod_base = OTHER; note = 2'O-methyl cytidine
  modified_base 17: mod_base = OTHER; note = 2'-fluoro adenosine
  modified_base 18: mod_base = OTHER; note = 2'O-methyl cytidine
  modified_base 19: mod_base = OTHER; note = 2'-fluoro guanosine
  modified_base 20: mod_base = OTHER; note = 2'O-methyl adenosine phosphorothioate
  modified_base 21: mod_base = OTHER; note = 2'-fluoro adenosine
ccctaaagtcaagtccacgaa

SEQ ID NO: 1299 - RNA, 21 nt, synthetic construct
  source 1..21: mol_type = other RNA
  modified_base 1: mod_base = OTHER; note = 2'-fluoro cytidine phosphorothioate
  modified_base 2: mod_base = OTHER; note = 2'O-methyl cytidine phosphorothioate
  modified_base 3: mod_base = OTHER; note = 2'-fluoro uridine
  modified_base 4: mod_base = OTHER; note = 2'O-methyl adenosine
  modified_base 5: mod_base = OTHER; note = 2'-fluoro adenosine
  modified_base 6: mod_base = OTHER; note = 2'O-methyl adenosine
  modified_base 7: mod_base = OTHER; note = 2'-fluoro guanosine
  modified_base 8: mod_base = OTHER; note = 2'O-methyl uridine
  modified_base 9: mod_base = OTHER; note = 2'-fluoro cytidine
  modified_base 10: mod_base = OTHER; note = 2'O-methyl adenosine
  modified_base 11: mod_base = OTHER; note = 2'-fluoro adenosine
  modified_base 12: mod_base = OTHER; note = 2'O-methyl guanosine
  modified_base 13: mod_base = OTHER; note = 2'-fluoro uridine
  modified_base 14: mod_base = OTHER; note = 2'O-methyl cytidine
  modified_base 15: mod_base = OTHER; note = 2'-fluoro cytidine
  modified_base 16: mod_base = OTHER; note = 2'O-methyl adenosine
  modified_base 17: mod_base = OTHER; note = 2'-fluoro cytidine
  modified_base 18: mod_base = OTHER; note = 2'O-methyl guanosine
  modified_base 19: mod_base = OTHER; note = 2'-fluoro adenosine
  modified_base 20: mod_base = OTHER; note = 2'O-methyl adenosine phosphorothioate
  modified_base 21: mod_base = OTHER; note = 2'-fluoro cytidine
cctaaagtcaagtccacgaac

SEQ ID NO: 1300 - RNA, 21 nt, synthetic construct
  source 1..21: mol_type = other RNA
  modified_base 1: mod_base = OTHER; note = 2'-fluoro uridine phosphorothioate
  modified_base 2: mod_base = OTHER; note = 2'O-methyl adenosine phosphorothioate
  modified_base 3: mod_base = OTHER; note = 2'-fluoro adenosine
  modified_base 4: mod_base = OTHER; note = 2'O-methyl adenosine
  modified_base 5: mod_base = OTHER; note = 2'-fluoro guanosine
  modified_base 6: mod_base = OTHER; note = 2'O-methyl uridine
  modified_base 7: mod_base = OTHER; note = 2'-fluoro cytidine
  modified_base 8: mod_base = OTHER; note = 2'O-methyl adenosine
  modified_base 9: mod_base = OTHER; note = 2'-fluoro adenosine
  modified_base 10: mod_base = OTHER; note = 2'O-methyl guanosine
  modified_base 11: mod_base = OTHER; note = 2'-fluoro uridine
  modified_base 12: mod_base = OTHER; note = 2'O-methyl cytidine
  modified_base 13: mod_base = OTHER; note = 2'-fluoro cytidine
  modified_base 14: mod_base = OTHER; note = 2'O-methyl adenosine
  modified_base 15: mod_base = OTHER; note = 2'-fluoro cytidine
  modified_base 16: mod_base = OTHER; note = 2'O-methyl guanosine
  modified_base 17: mod_base = OTHER; note = 2'-fluoro adenosine
  modified_base 18: mod_base = OTHER; note = 2'O-methyl adenosine
  modified_base 19: mod_base = OTHER; note = 2'-fluoro cytidine
  modified_base 20: mod_base = OTHER; note = 2'O-methyl uridine phosphorothioate
  modified_base 21: mod_base = OTHER; note = 2'-fluoro uridine
taaagtcaagtccacgaactt

SEQ ID NO: 1301 - RNA, 21 nt, synthetic construct
  source 1..21: mol_type = other RNA
  modified_base 1: mod_base = OTHER; note = 2'-fluoro adenosine phosphorothioate
  modified_base 2: mod_base = OTHER; note = 2'O-methyl adenosine phosphorothioate
  modified_base 3: mod_base = OTHER; note = 2'-fluoro adenosine
  modified_base 4: mod_base = OTHER; note = 2'O-methyl guanosine
  modified_base 5: mod_base = OTHER; note = 2'-fluoro uridine
  modified_base 6: mod_base = OTHER; note = 2'O-methyl cytidine
  modified_base 7: mod_base = OTHER; note = 2'-fluoro adenosine
  modified_base 8: mod_base = OTHER; note = 2'O-methyl adenosine
  modified_base 9: mod_base = OTHER; note = 2'-fluoro guanosine
  modified_base 10: mod_base = OTHER; note = 2'O-methyl uridine
  modified_base 11: mod_base = OTHER; note = 2'-fluoro cytidine
  modified_base 12: mod_base = OTHER; note = 2'O-methyl cytidine
  modified_base 13: mod_base = OTHER; note = 2'-fluoro adenosine
  modified_base 14: mod_base = OTHER; note = 2'O-methyl cytidine
  modified_base 15: mod_base = OTHER; note = 2'-fluoro guanosine
  modified_base 16: mod_base = OTHER; note = 2'O-methyl adenosine
  modified_base 17: mod_base = OTHER; note = 2'-fluoro adenosine
  modified_base 18: mod_base = OTHER; note = 2'O-methyl cytidine
  modified_base 19: mod_base = OTHER; note = 2'-fluoro uridine
  modified_base 20: mod_base = OTHER; note = 2'O-methyl uridine phosphorothioate
  modified_base 21: mod_base = OTHER; note = 2'-fluoro uridine
aaagtcaagtccacgaacttt

SEQ ID NO: 1302 - RNA, 21 nt, synthetic construct
  source 1..21: mol_type = other RNA
  modified_base 1: mod_base = OTHER; note = 2'-fluoro adenosine phosphorothioate
  modified_base 2: mod_base = OTHER; note = 2'O-methyl adenosine phosphorothioate
  modified_base 3: mod_base = OTHER; note = 2'-fluoro guanosine
  modified_base 4: mod_base = OTHER; note = 2'O-methyl uridine
  modified_base 5: mod_base = OTHER; note = 2'-fluoro cytidine
  modified_base 6: mod_base = OTHER; note = 2'O-methyl adenosine
  modified_base 7: mod_base = OTHER; note = 2'-fluoro adenosine
  modified_base 8: mod_base = OTHER; note = 2'O-methyl guanosine
  modified_base 9: mod_base = OTHER; note = 2'-fluoro uridine
  modified_base 10: mod_base = OTHER; note = 2'O-methyl cytidine
  modified_base 11: mod_base = OTHER; note = 2'-fluoro cytidine
  modified_base 12: mod_base = OTHER; note = 2'O-methyl adenosine
  modified_base 13: mod_base = OTHER; note = 2'-fluoro cytidine
  modified_base 14: mod_base = OTHER; note = 2'O-methyl guanosine
  modified_base 15: mod_base = OTHER; note = 2'-fluoro adenosine
  modified_base 16: mod_base = OTHER; note = 2'O-methyl adenosine
  modified_base 17: mod_base = OTHER; note = 2'-fluoro cytidine
  modified_base 18: mod_base = OTHER; note = 2'O-methyl uridine
  modified_base 19: mod_base = OTHER; note = 2'-fluoro uridine
  modified_base 20: mod_base = OTHER; note = 2'O-methyl uridine phosphorothioate
  modified_base 21: mod_base = OTHER; note = 2'-fluoro cytidine
aagtcaagtccacgaactttc

SEQ ID NO: 1303 - RNA, 21 nt, synthetic construct
  source 1..21: mol_type = other RNA
  modified_base 1: mod_base = OTHER; note = 2'-fluoro adenosine phosphorothioate
  modified_base 2: mod_base = OTHER; note = 2'O-methyl guanosine phosphorothioate
  modified_base 3: mod_base = OTHER; note = 2'-fluoro uridine
  modified_base 4: mod_base = OTHER; note = 2'O-methyl cytidine
  modified_base 5: mod_base = OTHER; note = 2'-fluoro adenosine
  modified_base 6: mod_base = OTHER; note = 2'O-methyl adenosine
  modified_base 7: mod_base = OTHER; note = 2'-fluoro guanosine
  modified_base 8: mod_base = OTHER; note = 2'O-methyl uridine
  modified_base 9: mod_base = OTHER; note = 2'-fluoro cytidine
  modified_base 10: mod_base = OTHER; note = 2'O-methyl cytidine
  modified_base 11: mod_base = OTHER; note = 2'-fluoro adenosine
  modified_base 12: mod_base = OTHER; note = 2'O-methyl cytidine
  modified_base 13: mod_base = OTHER; note = 2'-fluoro guanosine
  modified_base 14: mod_base = OTHER; note = 2'O-methyl adenosine
  modified_base 15: mod_base = OTHER; note = 2'-fluoro adenosine
  modified_base 16: mod_base = OTHER; note = 2'O-methyl cytidine
  modified_base 17: mod_base = OTHER; note = 2'-fluoro uridine
  modified_base 18: mod_base = OTHER; note = 2'O-methyl uridine
  modified_base 19: mod_base = OTHER; note = 2'-fluoro uridine
  modified_base 20: mod_base = OTHER; note = 2'O-methyl cytidine phosphorothioate
  modified_base 21: mod_base = OTHER; note = 2'-fluoro uridine
agtcaagtccacgaactttct

SEQ ID NO: 1304 - RNA, 21 nt, synthetic construct
  source 1..21: mol_type = other RNA
  modified_base 1: mod_base = OTHER; note = 2'-fluoro guanosine phosphorothioate
  modified_base 2: mod_base = OTHER; note = 2'O-methyl uridine phosphorothioate
  modified_base 3: mod_base = OTHER; note = 2'-fluoro cytidine
  modified_base 4: mod_base = OTHER; note = 2'O-methyl adenosine
  modified_base 5: mod_base = OTHER; note = 2'-fluoro adenosine
  modified_base 6: mod_base = OTHER; note = 2'O-methyl guanosine
  modified_base 7: mod_base = OTHER; note = 2'-fluoro uridine
  modified_base 8: mod_base = OTHER; note = 2'O-methyl cytidine
  modified_base 9: mod_base = OTHER; note = 2'-fluoro cytidine
  modified_base 10: mod_base = OTHER; note = 2'O-methyl adenosine
  modified_base 11: mod_base = OTHER; note = 2'-fluoro cytidine
  modified_base 12: mod_base = OTHER; note = 2'O-methyl guanosine
  modified_base 13: mod_base = OTHER; note = 2'-fluoro adenosine
  modified_base 14: mod_base = OTHER; note = 2'O-methyl adenosine
  modified_base 15: mod_base = OTHER; note = 2'-fluoro cytidine
  modified_base 16: mod_base = OTHER; note = 2'O-methyl uridine
  modified_base 17: mod_base = OTHER; note = 2'-fluoro uridine
  modified_base 18: mod_base = OTHER; note = 2'O-methyl uridine
  modified_base 19: mod_base = OTHER; note = 2'-fluoro cytidine
  modified_base 20: mod_base = OTHER; note = 2'O-methyl uridine phosphorothioate
  modified_base 21: mod_base = OTHER; note = 2'-fluoro uridine
gtcaagtccacgaactttctt

SEQ ID NO: 1305 - RNA, 21 nt, synthetic construct
  source 1..21: mol_type = other RNA
  modified_base 1: mod_base = OTHER; note = 2'-fluoro uridine phosphorothioate
  modified_base 2: mod_base = OTHER; note = 2'O-methyl cytidine phosphorothioate
  modified_base 3: mod_base = OTHER; note = 2'-fluoro adenosine
  modified_base 4: mod_base = OTHER; note = 2'O-methyl adenosine
  modified_base 5: mod_base = OTHER; note = 2'-fluoro guanosine
  modified_base 6: mod_base = OTHER; note = 2'O-methyl uridine
  modified_base 7: mod_base = OTHER; note = 2'-fluoro cytidine
  modified_base 8: mod_base = OTHER; note = 2'O-methyl cytidine
  modified_base 9: mod_base = OTHER; note = 2'-fluoro adenosine
  modified_base 10: mod_base = OTHER; note = 2'O-methyl cytidine
  modified_base 11: mod_base = OTHER; note = 2'-fluoro guanosine
  modified_base 12: mod_base = OTHER; note = 2'O-methyl adenosine
  modified_base 13: mod_base = OTHER; note = 2'-fluoro adenosine
  modified_base 14: mod_base = OTHER; note = 2'O-methyl cytidine
  modified_base 15: mod_base = OTHER; note = 2'-fluoro uridine
  modified_base 16: mod_base = OTHER; note = 2'O-methyl uridine
  modified_base 17: mod_base = OTHER; note = 2'-fluoro uridine
  modified_base 18: mod_base = OTHER; note = 2'O-methyl cytidine
  modified_base 19: mod_base = OTHER; note = 2'-fluoro uridine
  modified_base 20: mod_base = OTHER; note = 2'O-methyl uridine phosphorothioate
  modified_base 21: mod_base = OTHER; note = 2'-fluoro cytidine
tcaagtccacgaactttcttc

SEQ ID NO: 1306 - RNA, 21 nt, synthetic construct
  source 1..21: mol_type = other RNA
  modified_base 1: mod_base = OTHER; note = 2'-fluoro cytidine phosphorothioate
  modified_base 2: mod_base = OTHER; note = 2'O-methyl adenosine phosphorothioate
  modified_base 3: mod_base = OTHER; note = 2'-fluoro adenosine
  modified_base 4: mod_base = OTHER; note = 2'O-methyl guanosine
  modified_base 5: mod_base = OTHER; note = 2'-fluoro uridine
  modified_base 6: mod_base = OTHER; note = 2'O-methyl cytidine
  modified_base 7: mod_base = OTHER; note = 2'-fluoro cytidine
  modified_base 8: mod_base = OTHER; note = 2'O-methyl adenosine
  modified_base 9: mod_base = OTHER; note = 2'-fluoro cytidine
  modified_base 10: mod_base = OTHER; note = 2'O-methyl guanosine
  modified_base 11: mod_base = OTHER; note = 2'-fluoro adenosine
  modified_base 12: mod_base = OTHER; note = 2'O-methyl adenosine
  modified_base 13: mod_base = OTHER; note = 2'-fluoro cytidine
  modified_base 14: mod_base = OTHER; note = 2'O-methyl uridine
  modified_base 15: mod_base = OTHER; note = 2'-fluoro uridine
  modified_base 16: mod_base = OTHER; note = 2'O-methyl uridine
  modified_base 17: mod_base = OTHER; note = 2'-fluoro cytidine
  modified_base 18: mod_base = OTHER; note = 2'O-methyl uridine
  modified_base 19: mod_base = OTHER; note = 2'-fluoro uridine
  modified_base 20: mod_base = OTHER; note = 2'O-methyl cytidine phosphorothioate
  modified_base 21: mod_base = OTHER; note = 2'-fluoro adenosine
caagtccacgaactttcttca

SEQ ID NO: 1307 - RNA, 21 nt, synthetic construct
  source 1..21: mol_type = other RNA
  modified_base 1: mod_base = OTHER; note = 2'-fluoro adenosine phosphorothioate
  modified_base 2: mod_base = OTHER; note = 2'O-methyl adenosine phosphorothioate
  modified_base 3: mod_base = OTHER; note = 2'-fluoro guanosine
  modified_base 4: mod_base = OTHER; note = 2'O-methyl uridine
  modified_base 5: mod_base = OTHER; note = 2'-fluoro cytidine
  modified_base 6: mod_base = OTHER; note = 2'O-methyl cytidine
  modified_base 7: mod_base = OTHER; note = 2'-fluoro adenosine
  modified_base 8: mod_base = OTHER; note = 2'O-methyl cytidine
  modified_base 9: mod_base = OTHER; note = 2'-fluoro guanosine
  modified_base 10: mod_base = OTHER; note = 2'O-methyl adenosine
  modified_base 11: mod_base = OTHER; note = 2'-fluoro adenosine
  modified_base 12: mod_base = OTHER; note = 2'O-methyl cytidine
  modified_base 13: mod_base = OTHER; note = 2'-fluoro uridine
  modified_base 14: mod_base = OTHER; note = 2'O-methyl uridine
  modified_base 15: mod_base = OTHER; note = 2'-fluoro uridine
  modified_base 16: mod_base = OTHER; note = 2'O-methyl cytidine
  modified_base 17: mod_base = OTHER; note = 2'-fluoro uridine
  modified_base 18: mod_base = OTHER; note = 2'O-methyl uridine
  modified_base 19: mod_base = OTHER; note = 2'-fluoro cytidine
  modified_base 20: mod_base = OTHER; note = 2'O-methyl adenosine phosphorothioate
  modified_base 21: mod_base = OTHER; note = 2'-fluoro uridine
aagtccacgaactttcttcat

SEQ ID NO: 1308 - RNA, 21 nt, synthetic construct
  source 1..21: mol_type = other RNA
  modified_base 1: mod_base = OTHER; note = 2'-fluoro adenosine phosphorothioate
  modified_base 2: mod_base = OTHER; note = 2'O-methyl guanosine phosphorothioate
  modified_base 3: mod_base = OTHER; note = 2'-fluoro uridine
  modified_base 4: mod_base = OTHER; note = 2'O-methyl cytidine
  modified_base 5: mod_base = OTHER; note = 2'-fluoro cytidine
  modified_base 6: mod_base = OTHER; note = 2'O-methyl adenosine
  modified_base 7: mod_base = OTHER; note = 2'-fluoro cytidine
  modified_base 8: mod_base = OTHER; note = 2'O-methyl guanosine
  modified_base 9: mod_base = OTHER; note = 2'-fluoro adenosine
  modified_base 10: mod_base = OTHER; note = 2'O-methyl adenosine
  modified_base 11: mod_base = OTHER; note = 2'-fluoro cytidine
  modified_base 12: mod_base = OTHER; note = 2'O-methyl uridine
  modified_base 13: mod_base = OTHER; note = 2'-fluoro uridine
  modified_base 14: mod_base = OTHER; note = 2'O-methyl uridine
  modified_base 15: mod_base = OTHER; note = 2'-fluoro cytidine
  modified_base 16: mod_base = OTHER; note = 2'O-methyl uridine
  modified_base 17: mod_base = OTHER; note = 2'-fluoro uridine
  modified_base 18: mod_base = OTHER; note = 2'O-methyl cytidine
  modified_base 19: mod_base = OTHER; note = 2'-fluoro adenosine
  modified_base 20: mod_base = OTHER; note = 2'O-methyl uridine phosphorothioate
  modified_base 21: mod_base = OTHER; note = 2'-fluoro guanosine
agtccacgaactttcttcatg

SEQ ID NO: 1309 - RNA, 21 nt, synthetic construct
  source 1..21: mol_type = other RNA
  modified_base 1: mod_base = OTHER; note = 2'-fluoro uridine phosphorothioate
  modified_base 2: mod_base = OTHER; note = 2'O-methyl cytidine phosphorothioate
  modified_base 3: mod_base = OTHER; note = 2'-fluoro cytidine
  modified_base 4: mod_base = OTHER; note = 2'O-methyl adenosine
  modified_base 5: mod_base = OTHER; note = 2'-fluoro cytidine
  modified_base 6: mod_base = OTHER; note = 2'O-methyl guanosine
  modified_base 7: mod_base = OTHER; note = 2'-fluoro adenosine
  modified_base 8: mod_base = OTHER; note = 2'O-methyl adenosine
  modified_base 9: mod_base = OTHER; note = 2'-fluoro cytidine
  modified_base 10: mod_base = OTHER; note = 2'O-methyl uridine
  modified_base 11: mod_base = OTHER; note = 2'-fluoro uridine
  modified_base 12: mod_base = OTHER; note = 2'O-methyl uridine
  modified_base 13: mod_base = OTHER; note = 2'-fluoro cytidine
  modified_base 14: mod_base = OTHER; note = 2'O-methyl uridine
  modified_base 15: mod_base = OTHER; note = 2'-fluoro uridine
  modified_base 16: mod_base = OTHER; note = 2'O-methyl cytidine
  modified_base 17: mod_base = OTHER; note = 2'-fluoro adenosine
  modified_base 18: mod_base = OTHER; note = 2'O-methyl uridine
  modified_base 19: mod_base = OTHER; note = 2'-fluoro guanosine
  modified_base 20: mod_base = OTHER; note = 2'O-methyl uridine phosphorothioate
  modified_base 21: mod_base = OTHER; note = 2'-fluoro guanosine
tccacgaactttcttcatgtg

SEQ ID NO: 1310 - RNA, 21 nt, synthetic construct
  source 1..21: mol_type = other RNA
  modified_base 1: mod_base = OTHER; note = 2'-fluoro cytidine phosphorothioate
  modified_base 2: mod_base = OTHER; note = 2'O-methyl adenosine phosphorothioate
  modified_base 3: mod_base = OTHER; note = 2'-fluoro uridine
  modified_base 4: mod_base = OTHER; note = 2'O-methyl cytidine
  modified_base 5: mod_base = OTHER; note = 2'-fluoro adenosine
  modified_base 6: mod_base = OTHER; note = 2'O-methyl cytidine
  modified_base 7: mod_base = OTHER; note = 2'-fluoro cytidine
  modified_base 8: mod_base = OTHER; note = 2'O-methyl adenosine
  modified_base 9: mod_base = OTHER; note = 2'-fluoro adenosine
  modified_base 10: mod_base = OTHER; note = 2'O-methyl guanosine
  modified_base 11: mod_base = OTHER; note = 2'-fluoro cytidine
  modified_base 12: mod_base = OTHER; note = 2'O-methyl uridine
  modified_base 13: mod_base = OTHER; note = 2'-fluoro cytidine
  modified_base 14: mod_base = OTHER; note = 2'O-methyl adenosine
  modified_base 15: mod_base = OTHER; note = 2'-fluoro guanosine
  modified_base 16: mod_base = OTHER; note = 2'O-methyl uridine
  modified_base 17: mod_base = OTHER; note = 2'-fluoro cytidine
  modified_base 18: mod_base = OTHER; note = 2'O-methyl uridine
  modified_base 19: mod_base = OTHER; note = 2'-fluoro adenosine
  modified_base 20: mod_base = OTHER; note = 2'O-methyl cytidine phosphorothioate
  modified_base 21: mod_base = OTHER; note = 2'-fluoro guanosine
catcaccaagctcagtctacg

SEQ ID NO: 1311 - RNA, 21 nt, synthetic construct
  source 1..21: mol_type = other RNA
  modified_base 1: mod_base = OTHER; note = 2'-fluoro adenosine phosphorothioate
  modified_base 2: mod_base = OTHER; note = 2'O-methyl uridine phosphorothioate
  modified_base 3: mod_base = OTHER; note = 2'-fluoro cytidine
  modified_base 4: mod_base = OTHER; note = 2'O-methyl adenosine
  modified_base 5: mod_base = OTHER; note = 2'-fluoro cytidine
  modified_base 6: mod_base = OTHER; note = 2'O-methyl cytidine
  modified_base 7: mod_base = OTHER; note = 2'-fluoro adenosine
  modified_base 8: mod_base = OTHER; note = 2'O-methyl adenosine
  modified_base 9: mod_base = OTHER; note = 2'-fluoro guanosine
  modified_base 10: mod_base = OTHER; note = 2'O-methyl cytidine
  modified_base 11: mod_base = OTHER; note = 2'-fluoro uridine
  modified_base 12: mod_base = OTHER; note = 2'O-methyl cytidine
  modified_base 13: mod_base = OTHER; note = 2'-fluoro adenosine
  modified_base 14: mod_base = OTHER; note = 2'O-methyl guanosine
  modified_base 15: mod_base = OTHER; note = 2'-fluoro uridine
  modified_base 16: mod_base = OTHER; note = 2'O-methyl cytidine
  modified_base 17: mod_base = OTHER; note = 2'-fluoro uridine
  modified_base 18: mod_base = OTHER; note = 2'O-methyl adenosine
  modified_base 19: mod_base = OTHER; note = 2'-fluoro cytidine
  modified_base 20: mod_base = OTHER; note = 2'O-methyl guanosine phosphorothioate
  modified_base 21: mod_base = OTHER; note = 2'-fluoro cytidine
atcaccaagctcagtctacgc

SEQ ID NO: 1312 - RNA, 21 nt, synthetic construct
  source 1..21: mol_type = other RNA
  modified_base 1: mod_base = OTHER; note = 2'-fluoro uridine phosphorothioate
  modified_base 2: mod_base = OTHER; note = 2'O-methyl cytidine phosphorothioate
  modified_base 3: mod_base = OTHER; note = 2'-fluoro adenosine
  modified_base 4: mod_base = OTHER; note = 2'O-methyl cytidine
  modified_base 5: mod_base = OTHER; note = 2'-fluoro cytidine
  modified_base 6: mod_base = OTHER; note = 2'O-methyl adenosine
  modified_base 7: mod_base = OTHER; note = 2'-fluoro adenosine
  modified_base 8: mod_base = OTHER; note = 2'O-methyl guanosine
  modified_base 9: mod_base = OTHER; note = 2'-fluoro cytidine
  modified_base 10: mod_base = OTHER; note = 2'O-methyl uridine
  modified_base 11: mod_base = OTHER; note = 2'-fluoro cytidine
  modified_base 12: mod_base = OTHER; note = 2'O-methyl adenosine
  modified_base 13: mod_base = OTHER; note = 2'-fluoro guanosine
  modified_base 14: mod_base = OTHER; note = 2'O-methyl uridine
  modified_base 15: mod_base = OTHER; note = 2'-fluoro cytidine
  modified_base 16: mod_base = OTHER; note = 2'O-methyl uridine
  modified_base 17: mod_base = OTHER; note = 2'-fluoro adenosine
  modified_base 18: mod_base = OTHER; note = 2'O-methyl cytidine
  modified_base 19: mod_base = OTHER; note = 2'-fluoro guanosine
  modified_base 20: mod_base = OTHER; note = 2'O-methyl cytidine phosphorothioate
  modified_base 21: mod_base = OTHER; note = 2'-fluoro cytidine
tcaccaagctcagtctacgcc

SEQ ID NO: 1313 - RNA, 21 nt, synthetic construct
  source 1..21: mol_type = other RNA
  modified_base 1: mod_base = OTHER; note = 2'-fluoro cytidine phosphorothioate
  modified_base 2: mod_base = OTHER; note = 2'O-methyl adenosine phosphorothioate
  modified_base 3: mod_base = OTHER; note = 2'-fluoro cytidine
  modified_base 4: mod_base = OTHER; note = 2'O-methyl cytidine
  modified_base 5: mod_base = OTHER; note = 2'-fluoro adenosine
  modified_base 6: mod_base = OTHER; note = 2'O-methyl adenosine
  modified_base 7: mod_base = OTHER; note = 2'-fluoro guanosine
  modified_base 8: mod_base = OTHER; note = 2'O-methyl cytidine
  modified_base 9: mod_base = OTHER; note = 2'-fluoro uridine
  modified_base 10: mod_base = OTHER; note = 2'O-methyl cytidine
  modified_base 11: mod_base = OTHER; note = 2'-fluoro adenosine
  modified_base 12: mod_base = OTHER; note = 2'O-methyl guanosine
  modified_base 13: mod_base = OTHER; note = 2'-fluoro uridine
  modified_base 14: mod_base = OTHER; note = 2'O-methyl cytidine
  modified_base 15: mod_base = OTHER; note = 2'-fluoro uridine
  modified_base 16: mod_base = OTHER; note = 2'O-methyl adenosine
  modified_base 17: mod_base = OTHER; note = 2'-fluoro cytidine
  modified_base 18: mod_base = OTHER; note = 2'O-methyl guanosine
  modified_base 19: mod_base = OTHER; note = 2'-fluoro cytidine
  modified_base 20: mod_base = OTHER; note = 2'O-methyl cytidine phosphorothioate
  modified_base 21: mod_base = OTHER; note = 2'-fluoro uridine
caccaagctcagtctacgcct

SEQ ID NO: 1314 - RNA, 21 nt, synthetic construct
  source 1..21: mol_type = other RNA
  modified_base 1: mod_base = OTHER; note = 2'-fluoro adenosine phosphorothioate
  modified_base 2: mod_base = OTHER; note = 2'O-methyl cytidine phosphorothioate
  modified_base 3: mod_base = OTHER; note = 2'-fluoro cytidine
  modified_base 4: mod_base = OTHER; note = 2'O-methyl adenosine
  modified_base 5: mod_base = OTHER; note = 2'-fluoro adenosine
  modified_base 6: mod_base = OTHER; note = 2'O-methyl guanosine
  modified_base 7: mod_base = OTHER; note = 2'-fluoro cytidine
  modified_base 8: mod_base = OTHER; note = 2'O-methyl uridine
  modified_base 9: mod_base = OTHER; note = 2'-fluoro cytidine
  modified_base 10: mod_base = OTHER; note = 2'O-methyl adenosine
  modified_base 11: mod_base = OTHER; note = 2'-fluoro guanosine
  modified_base 12: mod_base = OTHER; note = 2'O-methyl uridine
  modified_base 13: mod_base = OTHER; note = 2'-fluoro cytidine
  modified_base 14: mod_base = OTHER; note = 2'O-methyl uridine
  modified_base 15: mod_base = OTHER; note = 2'-fluoro adenosine
  modified_base 16: mod_base = OTHER; note = 2'O-methyl cytidine
  modified_base 17: mod_base = OTHER; note = 2'-fluoro guanosine
  modified_base 18: mod_base = OTHER; note = 2'O-methyl cytidine
  modified_base 19: mod_base = OTHER; note = 2'-fluoro cytidine
  modified_base 20: mod_base = OTHER; note = 2'O-methyl uridine phosphorothioate
  modified_base 21: mod_base = OTHER; note = 2'-fluoro cytidine
accaagctcagtctacgcctc

SEQ ID NO: 1315 - RNA, 21 nt, synthetic construct
  source 1..21: mol_type = other RNA
  modified_base 1: mod_base = OTHER; note = 2'-fluoro cytidine phosphorothioate
  modified_base 2: mod_base = OTHER; note = 2'O-methyl cytidine phosphorothioate
  modified_base 3: mod_base = OTHER; note = 2'-fluoro adenosine
  modified_base 4: mod_base = OTHER; note = 2'O-methyl adenosine
  modified_base 5: mod_base = OTHER; note = 2'-fluoro guanosine
  modified_base 6: mod_base = OTHER; note = 2'O-methyl cytidine
  modified_base 7: mod_base = OTHER; note = 2'-fluoro uridine
  modified_base 8: mod_base = OTHER; note = 2'O-methyl cytidine
  modified_base 9: mod_base = OTHER; note = 2'-fluoro adenosine
  modified_base 10: mod_base = OTHER; note = 2'O-methyl guanosine
  modified_base 11: mod_base = OTHER; note = 2'-fluoro uridine
  modified_base 12: mod_base = OTHER; note = 2'O-methyl cytidine
  modified_base 13: mod_base = OTHER; note = 2'-fluoro uridine
  modified_base 14: mod_base = OTHER; note = 2'O-methyl adenosine
  modified_base 15: mod_base = OTHER; note = 2'-fluoro cytidine
  modified_base 16: mod_base = OTHER; note = 2'O-methyl guanosine
  modified_base 17: mod_base = OTHER; note = 2'-fluoro cytidine
  modified_base 18: mod_base = OTHER; note = 2'O-methyl cytidine
  modified_base 19: mod_base = OTHER; note = 2'-fluoro uridine
  modified_base 20: mod_base = OTHER; note = 2'O-methyl cytidine phosphorothioate
  modified_base 21: mod_base = OTHER; note = 2'-fluoro uridine
ccaagctcagtctacgcctct

SEQ ID NO: 1316 - RNA, 21 nt, synthetic construct
  source 1..21: mol_type = other RNA
  modified_base 1: mod_base = OTHER; note = 2'-fluoro cytidine phosphorothioate
  modified_base 2: mod_base = OTHER; note = 2'O-methyl adenosine phosphorothioate
  modified_base 3: mod_base = OTHER; note = 2'-fluoro adenosine
  modified_base 4: mod_base = OTHER; note = 2'O-methyl guanosine
  modified_base 5: mod_base = OTHER; note = 2'-fluoro cytidine
  modified_base 6: mod_base = OTHER; note = 2'O-methyl uridine
  modified_base 7: mod_base = OTHER; note = 2'-fluoro cytidine
  modified_base 8: mod_base = OTHER; note = 2'O-methyl adenosine
  modified_base 9: mod_base = OTHER; note = 2'-fluoro guanosine
  modified_base 10: mod_base = OTHER; note = 2'O-methyl uridine
  modified_base 11: mod_base = OTHER; note = 2'-fluoro cytidine
  modified_base 12: mod_base = OTHER; note = 2'O-methyl uridine
  modified_base 13: mod_base = OTHER; note = 2'-fluoro adenosine
  modified_base 14: mod_base = OTHER; note = 2'O-methyl cytidine
  modified_base 15: mod_base = OTHER; note = 2'-fluoro guanosine
  modified_base 16: mod_base = OTHER; note = 2'O-methyl cytidine
  modified_base 17: mod_base = OTHER; note = 2'-fluoro cytidine
  modified_base 18: mod_base = OTHER; note = 2'O-methyl uridine
  modified_base 19: mod_base = OTHER; note = 2'-fluoro cytidine
  modified_base 20: mod_base = OTHER; note = 2'O-methyl uridine phosphorothioate
  modified_base 21: mod_base = OTHER; note = 2'-fluoro guanosine
caagctcagtctacgcctctg

SEQ ID NO: 1317 - RNA, 21 nt, synthetic construct
  source 1..21: mol_type = other RNA
  modified_base 1: mod_base = OTHER; note = 2'-fluoro cytidine phosphorothioate
  modified_base 2: mod_base = OTHER; note = 2'O-methyl uridine phosphorothioate
  modified_base 3: mod_base = OTHER; note = 2'-fluoro cytidine
  modified_base 4: mod_base = OTHER; note = 2'O-methyl adenosine
  modified_base 5: mod_base = OTHER; note = 2'-fluoro guanosine
  modified_base 6: mod_base = OTHER; note = 2'O-methyl uridine
  modified_base 7: mod_base = OTHER; note = 2'-fluoro cytidine
  modified_base 8: mod_base = OTHER; note = 2'O-methyl uridine
  modified_base 9: mod_base = OTHER; note = 2'-fluoro adenosine
  modified_base 10: mod_base = OTHER; note = 2'O-methyl cytidine
  modified_base 11: mod_base = OTHER; note = 2'-fluoro guanosine
  modified_base 12: mod_base = OTHER; note = 2'O-methyl cytidine
  modified_base 13: mod_base = OTHER; note = 2'-fluoro cytidine
  modified_base 14: mod_base = OTHER; note = 2'O-methyl uridine
  modified_base 15: mod_base = OTHER; note = 2'-fluoro cytidine
  modified_base 16: mod_base = OTHER; note = 2'O-methyl uridine
  modified_base 17: mod_base = OTHER; note = 2'-fluoro guanosine
  modified_base 18: mod_base = OTHER; note = 2'O-methyl cytidine
  modified_base 19: mod_base = OTHER; note = 2'-fluoro adenosine
  modified_base 20: mod_base = OTHER; note = 2'O-methyl cytidine phosphorothioate
  modified_base 21: mod_base = OTHER; note = 2'-fluoro adenosine
ctcagtctacgcctctgcaca

SEQ ID NO: 1318 - RNA, 21 nt, synthetic construct
  source 1..21: mol_type = other RNA
  modified_base 1: mod_base = OTHER; note = 2'-fluoro uridine phosphorothioate
  modified_base 2: mod_base = OTHER; note = 2'O-methyl cytidine phosphorothioate
  modified_base 3: mod_base = OTHER; note = 2'-fluoro adenosine
  modified_base 4: mod_base = OTHER; note = 2'O-methyl guanosine
  modified_base 5: mod_base = OTHER; note = 2'-fluoro uridine
  modified_base 6: mod_base = OTHER; note = 2'O-methyl cytidine
  modified_base 7: mod_base = OTHER; note = 2'-fluoro uridine
  modified_base 8: mod_base = OTHER; note = 2'O-methyl adenosine
  modified_base 9: mod_base = OTHER; note = 2'-fluoro cytidine
  modified_base 10: mod_base = OTHER; note = 2'O-methyl guanosine
  modified_base 11: mod_base = OTHER; note = 2'-fluoro cytidine
  modified_base 12: mod_base = OTHER; note = 2'O-methyl cytidine
  modified_base 13: mod_base = OTHER; note = 2'-fluoro uridine
  modified_base 14: mod_base = OTHER; note = 2'O-methyl cytidine
  modified_base 15: mod_base = OTHER; note = 2'-fluoro uridine
  modified_base 16: mod_base = OTHER; note = 2'O-methyl guanosine
  modified_base 17: mod_base = OTHER; note = 2'-fluoro cytidine
  modified_base 18: mod_base = OTHER; note = 2'O-methyl adenosine
  modified_base 19: mod_base = OTHER; note = 2'-fluoro cytidine
  modified_base 20: mod_base = OTHER; note = 2'O-methyl adenosine phosphorothioate
  modified_base 21: mod_base = OTHER; note = 2'-fluoro guanosine
tcagtctacgcctctgcacag

SEQ ID NO: 1319 - RNA, 21 nt, synthetic construct
  source 1..21: mol_type = other RNA
  modified_base 1: mod_base = OTHER; note = 2'-fluoro cytidine phosphorothioate
  modified_base 2: mod_base = OTHER; note = 2'O-methyl adenosine phosphorothioate
  modified_base 3: mod_base = OTHER; note = 2'-fluoro guanosine
  modified_base 4: mod_base = OTHER; note = 2'O-methyl uridine
  modified_base 5: mod_base = OTHER; note = 2'-fluoro cytidine
  modified_base 6: mod_base = OTHER; note = 2'O-methyl uridine
  modified_base 7: mod_base = OTHER; note = 2'-fluoro adenosine
  modified_base 8: mod_base = OTHER; note = 2'O-methyl cytidine
  modified_base 9: mod_base = OTHER; note = 2'-fluoro guanosine
  modified_base 10: mod_base = OTHER; note = 2'O-methyl cytidine
  modified_base 11: mod_base = OTHER; note = 2'-fluoro cytidine
  modified_base 12: mod_base = OTHER; note = 2'O-methyl uridine
  modified_base 13: mod_base = OTHER; note = 2'-fluoro cytidine
  modified_base 14: mod_base = OTHER; note = 2'O-methyl uridine
  modified_base 15: mod_base = OTHER; note = 2'-fluoro guanosine
  modified_base 16: mod_base = OTHER; note = 2'O-methyl cytidine
  modified_base 17: mod_base = OTHER; note = 2'-fluoro adenosine
  modified_base 18: mod_base = OTHER; note = 2'O-methyl cytidine
  modified_base 19: mod_base = OTHER; note = 2'-fluoro adenosine
  modified_base 20: mod_base = OTHER; note = 2'O-methyl guanosine phosphorothioate
  modified_base 21: mod_base = OTHER; note = 2'-fluoro guanosine
cagtctacgcctctgcacagg

SEQ ID NO: 1320 - RNA, 21 nt, synthetic construct
  source 1..21: mol_type = other RNA
  modified_base 1: mod_base = OTHER; note = 2'-fluoro adenosine phosphorothioate
  modified_base 2: mod_base = OTHER; note = 2'O-methyl cytidine phosphorothioate
  modified_base 3: mod_base = OTHER; note = 2'-fluoro guanosine
  modified_base 4: mod_base = OTHER; note = 2'O-methyl cytidine
  modified_base 5: mod_base = OTHER; note = 2'-fluoro cytidine
  modified_base 6: mod_base = OTHER; note = 2'O-methyl uridine
  modified_base 7: mod_base = OTHER; note = 2'-fluoro cytidine
  modified_base 8: mod_base = OTHER; note = 2'O-methyl uridine
  modified_base 9: mod_base = OTHER; note = 2'-fluoro guanosine
  modified_base 10: mod_base = OTHER; note = 2'O-methyl cytidine
  modified_base 11: mod_base = OTHER; note = 2'-fluoro adenosine
  modified_base 12: mod_base = OTHER; note = 2'O-methyl cytidine
  modified_base 13: mod_base = OTHER; note = 2'-fluoro adenosine
  modified_base 14: mod_base = OTHER; note = 2'O-methyl guanosine
  modified_base 15: mod_base = OTHER; note = 2'-fluoro guanosine
  modified_base 16: mod_base = OTHER; note = 2'O-methyl guanosine
  modified_base 17: mod_base = OTHER; note = 2'-fluoro adenosine
  modified_base 18: mod_base = OTHER; note = 2'O-methyl adenosine
  modified_base 19: mod_base = OTHER; note = 2'-fluoro cytidine
  modified_base 20: mod_base = OTHER; note = 2'O-methyl cytidine phosphorothioate
  modified_base 21: mod_base = OTHER; note = 2'-fluoro uridine
acgcctctgcacagggaacct

SEQ ID NO: 1321 - RNA, 21 nt, synthetic construct
  source 1..21: mol_type = other RNA
  modified_base 1: mod_base = OTHER; note = 2'-fluoro cytidine phosphorothioate
  modified_base 2: mod_base = OTHER; note = 2'O-methyl guanosine phosphorothioate
  modified_base 3: mod_base = OTHER; note = 2'-fluoro cytidine
  modified_base 4: mod_base = OTHER; note = 2'O-methyl cytidine
  modified_base 5: mod_base = OTHER; note = 2'-fluoro uridine
  modified_base 6: mod_base = OTHER; note = 2'O-methyl cytidine
  modified_base 7: mod_base = OTHER; note = 2'-fluoro uridine
  modified_base 8: mod_base = OTHER; note = 2'O-methyl guanosine
  modified_base 9: mod_base = OTHER; note = 2'-fluoro cytidine
  modified_base 10: mod_base = OTHER; note = 2'O-methyl adenosine
  modified_base 11: mod_base = OTHER; note = 2'-fluoro cytidine
  modified_base 12: mod_base = OTHER; note = 2'O-methyl adenosine
  modified_base 13: mod_base = OTHER; note = 2'-fluoro guanosine
  modified_base 14: mod_base = OTHER; note = 2'O-methyl guanosine
  modified_base 15: mod_base = OTHER; note = 2'-fluoro guanosine
  modified_base 16: mod_base = OTHER; note = 2'O-methyl adenosine
  modified_base 17: mod_base = OTHER; note = 2'-fluoro adenosine
  modified_base 18: mod_base = OTHER; note = 2'O-methyl cytidine
  modified_base 19: mod_base = OTHER; note = 2'-fluoro cytidine
  modified_base 20: mod_base = OTHER; note = 2'O-methyl uridine phosphorothioate
  modified_base 21: mod_base = OTHER; note = 2'-fluoro cytidine
cgcctctgcacagggaacctc

SEQ ID NO: 1322 - RNA, 21 nt, synthetic construct
  source 1..21: mol_type = other RNA
  modified_base 1: mod_base = OTHER; note = 2'-fluoro guanosine phosphorothioate
  modified_base 2: mod_base = OTHER; note = 2'O-methyl cytidine phosphorothioate
  modified_base 3: mod_base = OTHER; note = 2'-fluoro cytidine
  modified_base 4: mod_base = OTHER; note = 2'O-methyl uridine
  modified_base 5: mod_base = OTHER; note = 2'-fluoro cytidine
  modified_base 6: mod_base = OTHER; note = 2'O-methyl uridine
  modified_base 7: mod_base = OTHER; note = 2'-fluoro guanosine
  modified_base 8: mod_base = OTHER; note = 2'O-methyl cytidine
  modified_base 9: mod_base = OTHER; note = 2'-fluoro adenosine
  modified_base 10: mod_base = OTHER; note = 2'O-methyl cytidine
  modified_base 11: mod_base = OTHER; note = 2'-fluoro adenosine
  modified_base 12: mod_base = OTHER; note = 2'O-methyl guanosine
  modified_base 13: mod_base = OTHER; note = 2'-fluoro guanosine
  modified_base 14: mod_base = OTHER; note = 2'O-methyl guanosine
  modified_base 15: mod_base = OTHER; note = 2'-fluoro adenosine
  modified_base 16: mod_base = OTHER; note = 2'O-methyl adenosine
  modified_base 17: mod_base = OTHER; note = 2'-fluoro cytidine
  modified_base 18: mod_base = OTHER; note = 2'O-methyl cytidine
  modified_base 19: mod_base = OTHER; note = 2'-fluoro uridine
  modified_base 20: mod_base = OTHER; note = 2'O-methyl cytidine phosphorothioate
  modified_base 21: mod_base = OTHER; note = 2'-fluoro uridine
gcctctgcacagggaacctct

SEQ ID NO: 1323 - RNA, 21 nt, synthetic construct
  source 1..21: mol_type = other RNA
  modified_base 1: mod_base = OTHER; note = 2'-fluoro cytidine phosphorothioate
  modified_base 2: mod_base = OTHER; note = 2'O-methyl uridine phosphorothioate
  modified_base 3: mod_base = OTHER; note = 2'-fluoro cytidine
  modified_base 4: mod_base = OTHER; note = 2'O-methyl uridine
  modified_base 5: mod_base = OTHER; note = 2'-fluoro guanosine
  modified_base 6: mod_base = OTHER; note = 2'O-methyl cytidine
  modified_base 7: mod_base = OTHER; note = 2'-fluoro adenosine
  modified_base 8: mod_base = OTHER; note = 2'O-methyl cytidine
  modified_base 9: mod_base = OTHER; note = 2'-fluoro adenosine
  modified_base 10: mod_base = OTHER; note = 2'O-methyl guanosine
  modified_base 11: mod_base = OTHER; note = 2'-fluoro guanosine
  modified_base 12: mod_base = OTHER; note = 2'O-methyl guanosine
  modified_base 13: mod_base = OTHER; note = 2'-fluoro adenosine
  modified_base 14: mod_base = OTHER; note = 2'O-methyl adenosine
  modified_base 15: mod_base = OTHER; note = 2'-fluoro cytidine
  modified_base 16: mod_base = OTHER; note = 2'O-methyl cytidine
  modified_base 17: mod_base = OTHER; note = 2'-fluoro uridine
  modified_base 18: mod_base = OTHER; note = 2'O-methyl cytidine
  modified_base 19: mod_base = OTHER; note = 2'-fluoro uridine
  modified_base 20: mod_base = OTHER; note = 2'O-methyl adenosine phosphorothioate
  modified_base 21: mod_base = OTHER; note = 2'-fluoro cytidine
ctctgcacagggaacctctac

SEQ ID NO: 1324 - RNA, 21 nt, synthetic construct
  source 1..21: mol_type = other RNA
  modified_base 1: mod_base = OTHER; note = 2'-fluoro uridine phosphorothioate
  modified_base 2: mod_base = OTHER; note = 2'O-methyl cytidine phosphorothioate
  modified_base 3: mod_base = OTHER; note = 2'-fluoro uridine
  modified_base 4: mod_base = OTHER; note = 2'O-methyl guanosine
  modified_base 5: mod_base = OTHER; note = 2'-fluoro cytidine
  modified_base 6: mod_base = OTHER; note = 2'O-methyl adenosine
  modified_base 7: mod_base = OTHER; note = 2'-fluoro cytidine
  modified_base 8: mod_base = OTHER; note = 2'O-methyl adenosine
  modified_base 9: mod_base = OTHER; note = 2'-fluoro guanosine
  modified_base 10: mod_base = OTHER; note = 2'O-methyl guanosine
  modified_base 11: mod_base = OTHER; note = 2'-fluoro guanosine
  modified_base 12: mod_base = OTHER; note = 2'O-methyl adenosine
  modified_base 13: mod_base = OTHER; note = 2'-fluoro adenosine
  modified_base 14: mod_base = OTHER; note = 2'O-methyl cytidine
  modified_base 15: mod_base = OTHER; note = 2'-fluoro cytidine
  modified_base 16: mod_base = OTHER; note = 2'O-methyl uridine
  modified_base 17: mod_base = OTHER; note = 2'-fluoro cytidine
  modified_base 18: mod_base = OTHER; note = 2'O-methyl uridine
  modified_base 19: mod_base = OTHER; note = 2'-fluoro adenosine
  modified_base 20: mod_base = OTHER; note = 2'O-methyl cytidine phosphorothioate
  modified_base 21: mod_base = OTHER; note = 2'-fluoro cytidine
tctgcacagggaacctctacc

SEQ ID NO: 1325 - RNA, 21 nt, synthetic construct
  source 1..21: mol_type = other RNA
  modified_base 1: mod_base = OTHER; note = 2'-fluoro guanosine phosphorothioate
  modified_base 2: mod_base = OTHER; note = 2'O-methyl cytidine phosphorothioate
  modified_base 3: mod_base = OTHER; note = 2'-fluoro adenosine
  modified_base 4: mod_base = OTHER; note = 2'O-methyl cytidine
  modified_base 5: mod_base = OTHER; note = 2'-fluoro adenosine
  modified_base 6: mod_base = OTHER; note = 2'O-methyl guanosine
  modified_base 7: mod_base = OTHER; note = 2'-fluoro guanosine
  modified_base 8: mod_base = OTHER; note = 2'O-methyl guanosine
  modified_base 9: mod_base = OTHER; note = 2'-fluoro adenosine
  modified_base 10: mod_base = OTHER; note = 2'O-methyl adenosine
  modified_base 11: mod_base = OTHER; note = 2'-fluoro cytidine
  modified_base 12: mod_base = OTHER; note = 2'O-methyl cytidine
  modified_base 13: mod_base = OTHER; note = 2'-fluoro uridine
  modified_base 14: mod_base = OTHER; note = 2'O-methyl cytidine
  modified_base 15: mod_base = OTHER; note = 2'-fluoro uridine
  modified_base 16: mod_base = OTHER; note = 2'O-methyl adenosine
  modified_base 17: mod_base = OTHER; note = 2'-fluoro cytidine
  modified_base 18: mod_base = OTHER; note = 2'O-methyl cytidine
  modified_base 19: mod_base = OTHER; note = 2'-fluoro uridine
  modified_base 20: mod_base = OTHER; note = 2'O-methyl uridine phosphorothioate
  modified_base 21: mod_base = OTHER; note = 2'-fluoro cytidine
gcacagggaacctctaccttc

SEQ ID NO: 1326 - RNA, 21 nt, synthetic construct
  source 1..21: mol_type = other RNA
  modified_base 1: mod_base = OTHER; note = 2'-fluoro cytidine phosphorothioate
  modified_base 2: mod_base = OTHER; note = 2'O-methyl adenosine phosphorothioate
  modified_base 3: mod_base = OTHER; note = 2'-fluoro cytidine
  modified_base 4: mod_base = OTHER; note = 2'O-methyl adenosine
  modified_base 5: mod_base = OTHER; note = 2'-fluoro guanosine
  modified_base 6: mod_base = OTHER; note = 2'O-methyl guanosine
  modified_base 7: mod_base = OTHER; note = 2'-fluoro guanosine
  modified_base 8: mod_base = OTHER; note = 2'O-methyl adenosine
  modified_base 9: mod_base = OTHER; note = 2'-fluoro adenosine
  modified_base 10: mod_base = OTHER; note = 2'O-methyl cytidine
  modified_base 11: mod_base = OTHER; note = 2'-fluoro cytidine
  modified_base 12: mod_base = OTHER; note = 2'O-methyl uridine
  modified_base 13: mod_base = OTHER; note = 2'-fluoro cytidine
  modified_base 14: mod_base = OTHER; note = 2'O-methyl uridine
  modified_base 15: mod_base = OTHER; note = 2'-fluoro adenosine
  modified_base 16: mod_base = OTHER; note = 2'O-methyl cytidine
  modified_base 17: mod_base = OTHER; note = 2'-fluoro cytidine
  modified_base 18: mod_base = OTHER; note = 2'O-methyl uridine
  modified_base 19: mod_base = OTHER; note = 2'-fluoro uridine
  modified_base 20: mod_base = OTHER; note = 2'O-methyl cytidine phosphorothioate
  modified_base 21: mod_base = OTHER; note = 2'-fluoro uridine
cacagggaacctctaccttct

SEQ ID NO: 1327 - RNA, 21 nt, synthetic construct
  source 1..21: mol_type = other RNA
  modified_base 1: mod_base = OTHER; note = 2'-fluoro adenosine phosphorothioate
  modified_base 2: mod_base = OTHER; note = 2'O-methyl adenosine phosphorothioate
  modified_base 3: mod_base = OTHER; note = 2'-fluoro guanosine
  modified_base 4: mod_base = OTHER; note = 2'O-methyl guanosine
  modified_base 5: mod_base = OTHER; note = 2'-fluoro uridine
  modified_base 6: mod_base = OTHER; note = 2'O-methyl guanosine
  modified_base 7: mod_base = OTHER; note = 2'-fluoro cytidine
  modified_base 8: mod_base = OTHER; note = 2'O-methyl uridine
  modified_base 9: mod_base = OTHER; note = 2'-fluoro guanosine
  modified_base 10: mod_base = OTHER; note = 2'O-methyl guanosine
  modified_base 11: mod_base = OTHER; note = 2'-fluoro guanosine
  modified_base 12: mod_base = OTHER; note = 2'O-methyl adenosine
  modified_base 13: mod_base = OTHER; note = 2'-fluoro guanosine
  modified_base 14: mod_base = OTHER; note = 2'O-methyl adenosine
  modified_base 15: mod_base = OTHER; note = 2'-fluoro guanosine
  modified_base 16: mod_base = OTHER; note = 2'O-methyl adenosine
  modified_base 17: mod_base = OTHER; note = 2'-fluoro uridine
  modified_base 18: mod_base = OTHER; note = 2'O-methyl adenosine
  modified_base 19: mod_base = OTHER; note = 2'-fluoro uridine
  modified_base 20: mod_base = OTHER; note = 2'O-methyl guanosine phosphorothioate
  modified_base 21: mod_base = OTHER; note = 2'-fluoro cytidine
aaggtgctgggagagatatgc

SEQ ID NO: 1328 - RNA, 21 nt, synthetic construct
  source 1..21: mol_type = other RNA
  modified_base 1: mod_base = OTHER; note = 2'-fluoro adenosine phosphorothioate
  modified_base 2: mod_base = OTHER; note = 2'O-methyl guanosine phosphorothioate
  modified_base 3: mod_base = OTHER; note = 2'-fluoro guanosine
  modified_base 4: mod_base = OTHER; note = 2'O-methyl uridine
  modified_base 5: mod_base = OTHER; note = 2'-fluoro guanosine
  modified_base 6: mod_base = OTHER; note = 2'O-methyl cytidine
  modified_base 7: mod_base = OTHER; note = 2'-fluoro uridine
  modified_base 8: mod_base = OTHER; note = 2'O-methyl guanosine
  modified_base 9: mod_base = OTHER; note = 2'-fluoro guanosine
  modified_base 10: mod_base = OTHER; note = 2'O-methyl guanosine
  modified_base 11: mod_base = OTHER; note = 2'-fluoro adenosine
  modified_base 12: mod_base = OTHER; note = 2'O-methyl guanosine
  modified_base 13: mod_base = OTHER; note = 2'-fluoro adenosine
  modified_base 14: mod_base = OTHER; note = 2'O-methyl guanosine
  modified_base 15: mod_base = OTHER; note = 2'-fluoro adenosine
  modified_base 16: mod_base = OTHER; note = 2'O-methyl uridine
  modified_base 17: mod_base = OTHER; note = 2'-fluoro adenosine
  modified_base 18: mod_base = OTHER; note = 2'O-methyl uridine
  modified_base 19: mod_base = OTHER; note = 2'-fluoro guanosine
  modified_base 20: mod_base = OTHER; note = 2'O-methyl cytidine phosphorothioate
  modified_base 21: mod_base = OTHER; note = 2'-fluoro cytidine
aggtgctgggagagatatgcc

SEQ ID NO: 1329 - RNA, 21 nt, synthetic construct
  source 1..21: mol_type = other RNA
  modified_base 1: mod_base = OTHER; note = 2'-fluoro guanosine phosphorothioate
  modified_base 2: mod_base = OTHER; note = 2'O-methyl guanosine phosphorothioate
  modified_base 3: mod_base = OTHER; note = 2'-fluoro uridine
  modified_base 4: mod_base = OTHER; note = 2'O-methyl guanosine
  modified_base 5: mod_base = OTHER; note = 2'-fluoro cytidine
  modified_base 6: mod_base = OTHER; note = 2'O-methyl uridine
  modified_base 7: mod_base = OTHER; note = 2'-fluoro guanosine
  modified_base 8: mod_base = OTHER; note = 2'O-methyl guanosine
  modified_base 9: mod_base = OTHER; note = 2'-fluoro guanosine
  modified_base 10: mod_base = OTHER; note = 2'O-methyl adenosine
  modified_base 11: mod_base = OTHER; note = 2'-fluoro guanosine
  modified_base 12: mod_base = OTHER; note = 2'O-methyl adenosine
  modified_base 13: mod_base = OTHER; note = 2'-fluoro guanosine
  modified_base 14: mod_base = OTHER; note = 2'O-methyl adenosine
  modified_base 15: mod_base = OTHER; note = 2'-fluoro uridine
  modified_base 16: mod_base = OTHER; note = 2'O-methyl adenosine
  modified_base 17: mod_base = OTHER; note = 2'-fluoro uridine
  modified_base 18: mod_base = OTHER; note = 2'O-methyl guanosine
  modified_base 19: mod_base = OTHER; note = 2'-fluoro cytidine
  modified_base 20: mod_base = OTHER; note = 2'O-methyl cytidine phosphorothioate
  modified_base 21: mod_base = OTHER; note = 2'-fluoro uridine
ggtgctgggagagatatgcct

SEQ ID NO: 1330 - RNA, 21 nt, synthetic construct
  source 1..21: mol_type = other RNA
  modified_base 1: mod_base = OTHER; note = 2'-fluoro guanosine phosphorothioate
  modified_base 2: mod_base = OTHER; note = 2'O-methyl uridine phosphorothioate
  modified_base 3: mod_base = OTHER; note = 2'-fluoro guanosine
  modified_base 4: mod_base = OTHER; note = 2'O-methyl cytidine
  modified_base 5: mod_base = OTHER; note = 2'-fluoro uridine
  modified_base 6: mod_base = OTHER; note = 2'O-methyl guanosine
  modified_base 7: mod_base = OTHER; note = 2'-fluoro guanosine
  modified_base 8: mod_base = OTHER; note = 2'O-methyl guanosine
  modified_base 9: mod_base = OTHER; note = 2'-fluoro adenosine
  modified_base 10: mod_base = OTHER; note = 2'O-methyl guanosine
  modified_base 11: mod_base = OTHER; note = 2'-fluoro adenosine
  modified_base 12: mod_base = OTHER; note = 2'O-methyl guanosine
  modified_base 13: mod_base = OTHER; note = 2'-fluoro adenosine
  modified_base 14: mod_base = OTHER; note = 2'O-methyl uridine
  modified_base 15: mod_base = OTHER; note = 2'-fluoro adenosine
  modified_base 16: mod_base = OTHER; note = 2'O-methyl uridine
  modified_base 17: mod_base = OTHER; note = 2'-fluoro guanosine
  modified_base 18: mod_base = OTHER; note = 2'O-methyl cytidine
  modified_base 19: mod_base = OTHER; note = 2'-fluoro cytidine
  modified_base 20: mod_base = OTHER; note = 2'O-methyl uridine phosphorothioate
  modified_base 21: mod_base = OTHER; note = 2'-fluoro uridine
gtgctgggagagatatgcctt

SEQ ID NO: 1331 - RNA, 21 nt, synthetic construct
  source 1..21: mol_type = other RNA
  modified_base 1: mod_base = OTHER; note = 2'-fluoro adenosine phosphorothioate
  modified_base 2: mod_base = OTHER; note = 2'O-methyl uridine phosphorothioate
  modified_base 3: mod_base = OTHER; note = 2'-fluoro uridine
  modified_base 4: mod_base = OTHER; note = 2'O-methyl cytidine
  modified_base 5: mod_base = OTHER; note = 2'-fluoro adenosine
  modified_base 6: mod_base = OTHER; note = 2'O-methyl guanosine
  modified_base 7: mod_base = OTHER; note = 2'-fluoro guanosine
  modified_base 8: mod_base = OTHER; note = 2'O-methyl uridine
  modified_base 9: mod_base = OTHER; note = 2'-fluoro uridine
  modified_base 10: mod_base = OTHER; note = 2'O-methyl cytidine
  modified_base 11: mod_base = OTHER; note = 2'-fluoro uridine
  modified_base 12: mod_base = OTHER; note = 2'O-methyl uridine
  modified_base 13: mod_base = OTHER; note = 2'-fluoro guanosine
  modified_base 14: mod_base = OTHER; note = 2'O-methyl guanosine
  modified_base 15: mod_base = OTHER; note = 2'-fluoro adenosine
  modified_base 16: mod_base = OTHER; note = 2'O-methyl adenosine
  modified_base 17: mod_base = OTHER; note = 2'-fluoro guanosine
  modified_base 18: mod_base = OTHER; note = 2'O-methyl adenosine
  modified_base 19: mod_base = OTHER; note = 2'-fluoro guanosine
  modified_base 20: mod_base = OTHER; note = 2'O-methyl adenosine phosphorothioate
  modified_base 21: mod_base = OTHER; note = 2'-fluoro adenosine
attcaggttcttggaagagaa

SEQ ID NO: 1332 - RNA, 21 nt, synthetic construct
  source 1..21: mol_type = other RNA
  modified_base 1: mod_base = OTHER; note = 2'-fluoro guanosine phosphorothioate
  modified_base 2: mod_base = OTHER; note = 2'O-methyl uridine phosphorothioate
  modified_base 3: mod_base = OTHER; note = 2'-fluoro uridine
  modified_base 4: mod_base = OTHER; note = 2'O-methyl cytidine
  modified_base 5: mod_base = OTHER; note = 2'-fluoro uridine
  modified_base 6: mod_base = OTHER; note = 2'O-methyl uridine
  modified_base 7: mod_base = OTHER; note = 2'-fluoro guanosine
  modified_base 8: mod_base = OTHER; note = 2'O-methyl guanosine
  modified_base 9: mod_base = OTHER; note = 2'-fluoro adenosine
  modified_base 10: mod_base = OTHER; note = 2'O-methyl adenosine
  modified_base 11: mod_base = OTHER; note = 2'-fluoro guanosine
  modified_base 12: mod_base = OTHER; note = 2'O-methyl adenosine
  modified_base 13: mod_base = OTHER; note = 2'-fluoro guanosine
  modified_base 14: mod_base = OTHER; note = 2'O-methyl adenosine
  modified_base 15: mod_base = OTHER; note = 2'-fluoro adenosine
  modified_base 16: mod_base = OTHER; note = 2'O-methyl guanosine
  modified_base 17: mod_base = OTHER; note = 2'-fluoro guanosine
  modified_base 18: mod_base = OTHER; note = 2'O-methyl guanosine
  modified_base 19: mod_base = OTHER; note = 2'-fluoro cytidine
  modified_base 20: mod_base = OTHER; note = 2'O-methyl adenosine phosphorothioate
  modified_base 21: mod_base = OTHER; note = 2'-fluoro uridine
gttcttggaagagaagggcat

SEQ ID NO: 1333 - RNA, 21 nt, synthetic construct
  source 1..21: mol_type = other RNA
  modified_base 1: mod_base = OTHER; note = 2'-fluoro uridine phosphorothioate
  modified_base 2: mod_base = OTHER; note = 2'O-methyl uridine phosphorothioate
  modified_base 3: mod_base = OTHER; note = 2'-fluoro cytidine
  modified_base 4: mod_base = OTHER; note = 2'O-methyl uridine
  modified_base 5: mod_base = OTHER; note = 2'-fluoro uridine
  modified_base 6: mod_base = OTHER; note = 2'O-methyl guanosine
  modified_base 7: mod_base = OTHER; note = 2'-fluoro guanosine
  modified_base 8: mod_base = OTHER; note = 2'O-methyl adenosine
  modified_base 9: mod_base = OTHER; note = 2'-fluoro adenosine
  modified_base 10: mod_base = OTHER; note = 2'O-methyl guanosine
  modified_base 11: mod_base = OTHER; note = 2'-fluoro adenosine
  modified_base 12: mod_base = OTHER; note = 2'O-methyl guanosine
  modified_base 13: mod_base = OTHER; note = 2'-fluoro adenosine
  modified_base 14: mod_base = OTHER; note = 2'O-methyl adenosine
  modified_base 15: mod_base = OTHER; note = 2'-fluoro guanosine
  modified_base 16: mod_base = OTHER; note = 2'O-methyl guanosine
  modified_base 17: mod_base = OTHER; note = 2'-fluoro guanosine
  modified_base 18: mod_base = OTHER; note = 2'O-methyl cytidine
  modified_base 19: mod_base = OTHER; note = 2'-fluoro adenosine
  modified_base 20: mod_base = OTHER; note = 2'O-methyl uridine phosphorothioate
  modified_base 21: mod_base = OTHER; note = 2'-fluoro cytidine
ttcttggaagagaagggcatc

SEQ ID NO: 1334 - RNA, 21 nt, synthetic construct
  source 1..21: mol_type = other RNA
  modified_base 1: mod_base = OTHER; note = 2'-fluoro uridine phosphorothioate
  modified_base 2: mod_base = OTHER; note = 2'O-methyl cytidine phosphorothioate
  modified_base 3: mod_base = OTHER; note = 2'-fluoro uridine
  modified_base 4: mod_base = OTHER; note = 2'O-methyl uridine
  modified_base 5: mod_base = OTHER; note = 2'-fluoro guanosine
  modified_base 6: mod_base = OTHER; note = 2'O-methyl guanosine
  modified_base 7: mod_base = OTHER; note = 2'-fluoro adenosine
  modified_base 8: mod_base = OTHER; note = 2'O-methyl adenosine
  modified_base 9: mod_base = OTHER; note = 2'-fluoro guanosine
  modified_base 10: mod_base = OTHER; note = 2'O-methyl adenosine
  modified_base 11: mod_base = OTHER; note = 2'-fluoro guanosine
  modified_base 12: mod_base = OTHER; note = 2'O-methyl adenosine
  modified_base 13: mod_base = OTHER; note = 2'-fluoro adenosine
  modified_base 14: mod_base = OTHER; note = 2'O-methyl guanosine
  modified_base 15: mod_base = OTHER; note = 2'-fluoro guanosine
  modified_base 16: mod_base = OTHER; note = 2'O-methyl guanosine
  modified_base 17: mod_base = OTHER; note = 2'-fluoro cytidine
  modified_base 18: mod_base = OTHER; note = 2'O-methyl adenosine
  modified_base 19: mod_base = OTHER; note = 2'-fluoro uridine
  modified_base 20: mod_base = OTHER; note = 2'O-methyl cytidine phosphorothioate
  modified_base 21: mod_base = OTHER; note = 2'-fluoro uridine
tcttggaagagaagggcatct

SEQ ID NO: 1335 - RNA, 21 nt, synthetic construct
  source 1..21: mol_type = other RNA
  modified_base 1: mod_base = OTHER; note = 2'-fluoro cytidine phosphorothioate
  modified_base 2: mod_base = OTHER; note = 2'O-methyl uridine phosphorothioate
  modified_base 3: mod_base = OTHER; note = 2'-fluoro uridine
  modified_base 4: mod_base = OTHER; note = 2'O-methyl guanosine
  modified_base 5: mod_base = OTHER; note = 2'-fluoro guanosine
  modified_base 6: mod_base = OTHER; note = 2'O-methyl adenosine
  modified_base 7: mod_base = OTHER; note = 2'-fluoro adenosine
  modified_base 8: mod_base = OTHER; note = 2'O-methyl guanosine
  modified_base 9: mod_base = OTHER; note = 2'-fluoro adenosine
  modified_base 10: mod_base = OTHER; note = 2'O-methyl guanosine
  modified_base 11: mod_base = OTHER; note = 2'-fluoro adenosine
  modified_base 12: mod_base = OTHER; note = 2'O-methyl adenosine
  modified_base 13: mod_base = OTHER; note = 2'-fluoro guanosine
  modified_base 14: mod_base = OTHER; note = 2'O-methyl guanosine
  modified_base 15: mod_base = OTHER; note = 2'-fluoro guanosine
  modified_base 16: mod_base = OTHER; note = 2'O-methyl cytidine
  modified_base 17: mod_base = OTHER; note = 2'-fluoro adenosine
  modified_base 18: mod_base = OTHER; note = 2'O-methyl uridine
  modified_base 19: mod_base = OTHER; note = 2'-fluoro cytidine
  modified_base 20: mod_base = OTHER; note = 2'O-methyl uridine phosphorothioate
  modified_base 21: mod_base = OTHER; note = 2'-fluoro guanosine
cttggaagagaagggcatctg

SEQ ID NO: 1336 - RNA, 21 nt, synthetic construct
  source 1..21: mol_type = other RNA
  modified_base 1: mod_base = OTHER; note = 2'-fluoro uridine phosphorothioate
  modified_base 2: mod_base = OTHER; note = 2'O-methyl uridine phosphorothioate
  modified_base 3: mod_base = OTHER; note = 2'-fluoro guanosine
  modified_base 4: mod_base = OTHER; note = 2'O-methyl guanosine
  modified_base 5: mod_base = OTHER; note = 2'-fluoro adenosine
  modified_base 6: mod_base = OTHER; note = 2'O-methyl adenosine
  modified_base 7: mod_base = OTHER; note = 2'-fluoro guanosine
  modified_base 8: mod_base = OTHER; note = 2'O-methyl adenosine
  modified_base 9: mod_base = OTHER; note = 2'-fluoro guanosine
  modified_base 10: mod_base = OTHER; note = 2'O-methyl adenosine
  modified_base 11: mod_base = OTHER; note = 2'-fluoro adenosine
  modified_base 12: mod_base = OTHER; note = 2'O-methyl guanosine
  modified_base 13: mod_base = OTHER; note = 2'-fluoro guanosine
  modified_base 14: mod_base = OTHER; note = 2'O-methyl guanosine
  modified_base 15: mod_base = OTHER; note = 2'-fluoro cytidine
  modified_base 16: mod_base = OTHER; note = 2'O-methyl adenosine
  modified_base 17: mod_base = OTHER; note = 2'-fluoro uridine
  modified_base 18: mod_base = OTHER; note = 2'O-methyl cytidine
  modified_base 19: mod_base = OTHER; note = 2'-fluoro uridine
  modified_base 20: mod_base = OTHER; note = 2'O-methyl guanosine phosphorothioate
  modified_base 21: mod_base = OTHER; note = 2'-fluoro cytidine
ttggaagagaagggcatctgc

SEQ ID NO: 1337 - RNA, 21 nt, synthetic construct
  source 1..21: mol_type = other RNA
  modified_base 1: mod_base = OTHER; note = 2'-fluoro guanosine phosphorothioate
  modified_base 2: mod_base = OTHER; note = 2'O-methyl guanosine phosphorothioate
  modified_base 3: mod_base = OTHER; note = 2'-fluoro adenosine
  modified_base 4: mod_base = OTHER; note = 2'O-methyl adenosine
  modified_base 5: mod_base = OTHER; note = 2'-fluoro guanosine
  modified_base 6: mod_base = OTHER; note = 2'O-methyl adenosine
  modified_base 7: mod_base = OTHER; note = 2'-fluoro guanosine
  modified_base 8: mod_base = OTHER; note = 2'O-methyl adenosine
  modified_base 9: mod_base = OTHER; note = 2'-fluoro adenosine
  modified_base 10: mod_base = OTHER; note = 2'O-methyl guanosine
  modified_base 11: mod_base = OTHER; note = 2'-fluoro guanosine
  modified_base 12: mod_base = OTHER; note = 2'O-methyl guanosine
  modified_base 13: mod_base = OTHER; note = 2'-fluoro cytidine
  modified_base 14: mod_base = OTHER; note = 2'O-methyl adenosine
  modified_base 15: mod_base = OTHER; note = 2'-fluoro uridine
  modified_base 16: mod_base = OTHER; note = 2'O-methyl cytidine
  modified_base 17: mod_base = OTHER; note = 2'-fluoro uridine
  modified_base 18: mod_base = OTHER; note = 2'O-methyl guanosine
  modified_base 19: mod_base = OTHER; note = 2'-fluoro cytidine
  modified_base 20: mod_base = OTHER; note = 2'O-methyl adenosine phosphorothioate
  modified_base 21: mod_base = OTHER; note = 2'-fluoro adenosine
ggaagagaagggcatctgcaa

SEQ ID NO: 1338 - RNA, 21 nt, synthetic construct
  source 1..21: mol_type = other RNA
  modified_base 1: mod_base = OTHER; note = 2'-fluoro guanosine phosphorothioate
  modified_base 2: mod_base = OTHER; note = 2'O-methyl adenosine phosphorothioate
  modified_base 3: mod_base = OTHER; note = 2'-fluoro adenosine
  modified_base 4: mod_base = OTHER; note = 2'O-methyl guanosine
  modified_base 5: mod_base = OTHER; note = 2'-fluoro adenosine
  modified_base 6: mod_base = OTHER; note = 2'O-methyl guanosine
  modified_base 7: mod_base = OTHER; note = 2'-fluoro adenosine
  modified_base 8: mod_base = OTHER; note = 2'O-methyl adenosine
  modified_base 9: mod_base = OTHER; note = 2'-fluoro guanosine
  modified_base 10: mod_base = OTHER; note = 2'O-methyl guanosine
  modified_base 11: mod_base = OTHER; note = 2'-fluoro guanosine
  modified_base 12: mod_base = OTHER; note = 2'O-methyl cytidine
  modified_base 13: mod_base = OTHER; note = 2'-fluoro adenosine
  modified_base 14: mod_base = OTHER; note = 2'O-methyl uridine
  modified_base 15: mod_base = OTHER; note = 2'-fluoro cytidine
  modified_base 16: mod_base = OTHER; note = 2'O-methyl uridine
  modified_base 17: mod_base = OTHER; note = 2'-fluoro guanosine
  modified_base 18: mod_base = OTHER; note = 2'O-methyl cytidine
  modified_base 19: mod_base = OTHER; note = 2'-fluoro adenosine
  modified_base 20: mod_base = OTHER; note = 2'O-methyl adenosine phosphorothioate
  modified_base 21: mod_base = OTHER; note = 2'-fluoro cytidine
gaagagaagggcatctgcaac

SEQ ID NO: 1339 - RNA, 21 nt, synthetic construct
  source 1..21: mol_type = other RNA
  modified_base 1: mod_base = OTHER; note = 2'-fluoro adenosine phosphorothioate
  modified_base 2: mod_base = OTHER; note = 2'O-methyl adenosine phosphorothioate
  modified_base 3: mod_base = OTHER; note = 2'-fluoro guanosine
  modified_base 4: mod_base = OTHER; note = 2'O-methyl adenosine
  modified_base 5: mod_base = OTHER; note = 2'-fluoro guanosine
  modified_base 6: mod_base = OTHER; note = 2'O-methyl adenosine
  modified_base 7: mod_base = OTHER; note = 2'-fluoro adenosine
  modified_base 8: mod_base = OTHER; note = 2'O-methyl guanosine
  modified_base 9: mod_base = OTHER; note = 2'-fluoro guanosine
  modified_base 10: mod_base = OTHER; note = 2'O-methyl guanosine
  modified_base 11: mod_base = OTHER; note = 2'-fluoro cytidine
  modified_base 12: mod_base = OTHER; note = 2'O-methyl adenosine
  modified_base 13: mod_base = OTHER; note = 2'-fluoro uridine
  modified_base 14: mod_base = OTHER; note = 2'O-methyl cytidine
  modified_base 15: mod_base = OTHER; note = 2'-fluoro uridine
  modified_base 16: mod_base = OTHER; note = 2'O-methyl guanosine
  modified_base 17: mod_base = OTHER; note = 2'-fluoro cytidine
  modified_base 18: mod_base = OTHER; note = 2'O-methyl adenosine
  modified_base 19: mod_base = OTHER; note = 2'-fluoro adenosine
  modified_base 20: mod_base = OTHER; note = 2'O-methyl cytidine phosphorothioate
  modified_base 21: mod_base = OTHER; note = 2'-fluoro adenosine
aagagaagggcatctgcaaca

SEQ ID NO: 1340 - RNA, 21 nt, synthetic construct
  source 1..21: mol_type = other RNA
  modified_base 1: mod_base = OTHER; note = 2'-fluoro adenosine phosphorothioate
  modified_base 2: mod_base = OTHER; note = 2'O-methyl guanosine phosphorothioate
  modified_base 3: mod_base = OTHER; note = 2'-fluoro adenosine
  modified_base 4: mod_base = OTHER; note = 2'O-methyl adenosine
  modified_base 5: mod_base = OTHER; note = 2'-fluoro guanosine
  modified_base 6: mod_base = OTHER; note = 2'O-methyl guanosine
  modified_base 7: mod_base = OTHER; note = 2'-fluoro guanosine
  modified_base 8: mod_base = OTHER; note = 2'O-methyl cytidine
  modified_base 9: mod_base = OTHER; note = 2'-fluoro adenosine
  modified_base 10: mod_base = OTHER; note = 2'O-methyl uridine
  modified_base 11: mod_base = OTHER; note = 2'-fluoro cytidine
  modified_base 12: mod_base = OTHER; note = 2'O-methyl uridine
  modified_base 13: mod_base = OTHER; note = 2'-fluoro guanosine
  modified_base 14: mod_base = OTHER; note = 2'O-methyl cytidine
  modified_base 15: mod_base = OTHER; note = 2'-fluoro adenosine
  modified_base 16: mod_base = OTHER; note = 2'O-methyl adenosine
  modified_base 17: mod_base = OTHER; note = 2'-fluoro cytidine
  modified_base 18: mod_base = OTHER; note = 2'O-methyl adenosine
  modified_base 19: mod_base = OTHER; note = 2'-fluoro guanosine
  modified_base 20: mod_base = OTHER; note = 2'O-methyl guanosine phosphorothioate
  modified_base 21: mod_base = OTHER; note = 2'-fluoro cytidine
agaagggcatctgcaacaggc

SEQ ID NO: 1341 - RNA, 21 nt, synthetic construct
  source 1..21: mol_type = other RNA
  modified_base 1: mod_base = OTHER; note = 2'-fluoro guanosine phosphorothioate
  modified_base 2: mod_base = OTHER; note = 2'O-methyl adenosine phosphorothioate
  modified_base 3: mod_base = OTHER; note = 2'-fluoro adenosine
  modified_base 4: mod_base = OTHER; note = 2'O-methyl guanosine
  modified_base 5: mod_base = OTHER; note = 2'-fluoro guanosine
  modified_base 6: mod_base = OTHER; note = 2'O-methyl guanosine
  modified_base 7: mod_base = OTHER; note = 2'-fluoro cytidine
  modified_base 8: mod_base = OTHER; note = 2'O-methyl adenosine
  modified_base 9: mod_base = OTHER; note = 2'-fluoro uridine
  modified_base 10: mod_base = OTHER; note = 2'O-methyl cytidine
  modified_base 11: mod_base = OTHER; note = 2'-fluoro uridine
  modified_base 12: mod_base = OTHER; note = 2'O-methyl guanosine
  modified_base 13: mod_base = OTHER; note = 2'-fluoro cytidine
  modified_base 14: mod_base = OTHER; note = 2'O-methyl adenosine
  modified_base 15: mod_base = OTHER; note = 2'-fluoro adenosine
  modified_base 16: mod_base = OTHER; note = 2'O-methyl cytidine
  modified_base 17: mod_base = OTHER; note = 2'-fluoro adenosine
  modified_base 18: mod_base = OTHER; note = 2'O-methyl guanosine
  modified_base 19: mod_base = OTHER; note = 2'-fluoro guanosine
  modified_base 20: mod_base = OTHER; note = 2'O-methyl cytidine phosphorothioate
  modified_base 21: mod_base = OTHER; note = 2'-fluoro cytidine
gaagggcatctgcaacaggcc

SEQ ID NO: 1342 - RNA, 21 nt, synthetic construct
  source 1..21: mol_type = other RNA
  modified_base 1: mod_base = OTHER; note = 2'-fluoro guanosine phosphorothioate
  modified_base 2: mod_base = OTHER; note = 2'O-methyl cytidine phosphorothioate
  modified_base 3: mod_base = OTHER; note = 2'-fluoro adenosine
  modified_base 4: mod_base = OTHER; note = 2'O-methyl uridine
  modified_base 5: mod_base = OTHER; note = 2'-fluoro cytidine
  modified_base 6: mod_base = OTHER; note = 2'O-methyl uridine
  modified_base 7: mod_base = OTHER; note = 2'-fluoro guanosine
  modified_base 8: mod_base = OTHER; note = 2'O-methyl cytidine
  modified_base 9: mod_base = OTHER; note = 2'-fluoro adenosine
  modified_base 10: mod_base = OTHER; note = 2'O-methyl adenosine
  modified_base 11: mod_base = OTHER; note = 2'-fluoro cytidine
  modified_base 12: mod_base = OTHER; note = 2'O-methyl adenosine
  modified_base 13: mod_base = OTHER; note = 2'-fluoro guanosine
  modified_base 14: mod_base = OTHER; note = 2'O-methyl guanosine
  modified_base 15: mod_base = OTHER; note = 2'-fluoro cytidine
  modified_base 16: mod_base = OTHER; note = 2'O-methyl cytidine
  modified_base 17: mod_base = OTHER; note = 2'-fluoro cytidine
  modified_base 18: mod_base = OTHER; note = 2'O-methyl cytidine
  modified_base 19: mod_base = OTHER; note = 2'-fluoro adenosine
  modified_base 20: mod_base = OTHER; note = 2'O-methyl guanosine phosphorothioate
  modified_base 21: mod_base = OTHER; note = 2'-fluoro cytidine
gcatctgcaacaggccccagc

SEQ ID NO: 1343 - RNA, 21 nt, synthetic construct
  source 1..21: mol_type = other RNA
  modified_base 1: mod_base = OTHER; note = 2'-fluoro uridine phosphorothioate
  modified_base 2: mod_base = OTHER; note = 2'O-methyl uridine phosphorothioate
  modified_base 3: mod_base = OTHER; note = 2'-fluoro guanosine
  modified_base 4: mod_base = OTHER; note = 2'O-methyl cytidine
  modified_base 5: mod_base = OTHER; note = 2'-fluoro adenosine
  modified_base 6: mod_base = OTHER; note = 2'O-methyl adenosine
  modified_base 7: mod_base = OTHER; note = 2'-fluoro cytidine
  modified_base 8: mod_base = OTHER; note = 2'O-methyl uridine
  modified_base 9: mod_base = OTHER; note = 2'-fluoro uridine
  modified_base 10: mod_base = OTHER; note = 2'O-methyl guanosine
  modified_base 11: mod_base = OTHER; note = 2'-fluoro cytidine
  modified_base 12: mod_base = OTHER; note = 2'O-methyl uridine
  modified_base 13: mod_base = OTHER; note = 2'-fluoro adenosine
  modified_base 14: mod_base = OTHER; note = 2'O-methyl cytidine
  modified_base 15: mod_base = OTHER; note = 2'-fluoro cytidine
  modified_base 16: mod_base = OTHER; note = 2'O-methyl cytidine
  modified_base 17: mod_base = OTHER; note = 2'-fluoro adenosine
  modified_base 18: mod_base = OTHER; note = 2'O-methyl uridine
  modified_base 19: mod_base = OTHER; note = 2'-fluoro uridine
  modified_base 20: mod_base = OTHER; note = 2'O-methyl adenosine phosphorothioate
  modified_base 21: mod_base = OTHER; note = 2'-fluoro guanosine
ttgcaacttgctacccattag

SEQ ID NO: 1344 - RNA, 21 nt, synthetic construct
  source 1..21: mol_type = other RNA
  modified_base 1: mod_base = OTHER; note = 2'-fluoro cytidine phosphorothioate
  modified_base 2: mod_base = OTHER; note = 2'O-methyl cytidine phosphorothioate
  modified_base 3: mod_base = OTHER; note = 2'-fluoro cytidine
  modified_base 4: mod_base = OTHER; note = 2'O-methyl adenosine
  modified_base 5: mod_base = OTHER; note = 2'-fluoro uridine
  modified_base 6: mod_base = OTHER; note = 2'O-methyl uridine
  modified_base 7: mod_base = OTHER; note = 2'-fluoro adenosine
  modified_base 8: mod_base = OTHER; note = 2'O-methyl guanosine
  modified_base 9: mod_base = OTHER; note = 2'-fluoro guanosine
  modified_base 10: mod_base = OTHER; note = 2'O-methyl adenosine
  modified_base 11: mod_base = OTHER; note = 2'-fluoro uridine
  modified_base 12: mod_base = OTHER; note = 2'O-methyl adenosine
  modified_base 13: mod_base = OTHER; note = 2'-fluoro adenosine
  modified_base 14: mod_base = OTHER; note = 2'O-methyl uridine
  modified_base 15: mod_base = OTHER; note = 2'-fluoro guanosine
  modified_base 16: mod_base = OTHER; note = 2'O-methyl uridine
  modified_base 17: mod_base = OTHER; note = 2'-fluoro cytidine
  modified_base 18: mod_base = OTHER; note = 2'O-methyl uridine
  modified_base 19: mod_base = OTHER; note = 2'-fluoro uridine
  modified_base 20: mod_base = OTHER; note = 2'O-methyl adenosine phosphorothioate
  modified_base 21: mod_base = OTHER; note = 2'-fluoro uridine
cccattaggataatgtcttat

SEQ ID NO: 1345 - RNA, 21 nt, synthetic construct
  source 1..21: mol_type = other RNA
  modified_base 1: mod_base = OTHER; note = 2'-fluoro adenosine phosphorothioate
  modified_base 2: mod_base = OTHER; note = 2'O-methyl adenosine phosphorothioate
  modified_base 3: mod_base = OTHER; note = 2'-fluoro uridine
  modified_base 4: mod_base = OTHER; note = 2'O-methyl guanosine
  modified_base 5: mod_base = OTHER; note = 2'-fluoro cytidine
  modified_base 6: mod_base = OTHER; note = 2'O-methyl uridine
  modified_base 7: mod_base = OTHER; note = 2'-fluoro guanosine
  modified_base 8: mod_base = OTHER; note = 2'O-methyl cytidine
  modified_base 9: mod_base = OTHER; note = 2'-fluoro cytidine
  modified_base 10: mod_base = OTHER; note = 2'O-methyl cytidine
  modified_base 11: mod_base = OTHER; note = 2'-fluoro uridine
  modified_base 12: mod_base = OTHER; note = 2'O-methyl guanosine
  modified_base 13: mod_base = OTHER; note = 2'-fluoro uridine
  modified_base 14: mod_base = OTHER; note = 2'O-methyl adenosine
  modified_base 15: mod_base = OTHER; note = 2'-fluoro cytidine
  modified_base 16: mod_base = OTHER; note = 2'O-methyl cytidine
  modified_base 17: mod_base = OTHER; note = 2'-fluoro cytidine
  modified_base 18: mod_base = OTHER; note = 2'O-methyl uridine
  modified_base 19: mod_base = OTHER; note = 2'-fluoro guanosine
  modified_base 20: mod_base = OTHER; note = 2'O-methyl cytidine phosphorothioate
  modified_base 21: mod_base = OTHER; note = 2'-fluoro cytidine
aatgctgccctgtaccctgcc

SEQ ID NO: 1346 - RNA, 21 nt, synthetic construct
  source 1..21: mol_type = other RNA
  modified_base 1: mod_base = OTHER; note = 2'-fluoro uridine phosphorothioate
  modified_base 2: mod_base = OTHER; note = 2'O-methyl guanosine phosphorothioate
  modified_base 3: mod_base = OTHER; note = 2'-fluoro cytidine
  modified_base 4: mod_base = OTHER; note = 2'O-methyl cytidine
  modified_base 5: mod_base = OTHER; note = 2'-fluoro cytidine
  modified_base 6: mod_base = OTHER; note = 2'O-methyl uridine
  modified_base 7: mod_base = OTHER; note = 2'-fluoro guanosine
  modified_base 8: mod_base = OTHER; note = 2'O-methyl uridine
  modified_base 9: mod_base = OTHER; note = 2'-fluoro adenosine
  modified_base 10: mod_base = OTHER; note = 2'O-methyl cytidine
  modified_base 11: mod_base = OTHER; note = 2'-fluoro cytidine
  modified_base 12: mod_base = OTHER; note = 2'O-methyl cytidine
  modified_base 13: mod_base = OTHER; note = 2'-fluoro uridine
  modified_base 14: mod_base = OTHER; note = 2'O-methyl guanosine
  modified_base 15: mod_base = OTHER; note = 2'-fluoro cytidine
  modified_base 16: mod_base = OTHER; note = 2'O-methyl cytidine
  modified_base 17: mod_base = OTHER; note = 2'-fluoro uridine
  modified_base 18: mod_base = OTHER; note = 2'O-methyl guanosine
  modified_base 19: mod_base = OTHER; note = 2'-fluoro uridine
  modified_base 20: mod_base = OTHER; note = 2'O-methyl guanosine phosphorothioate
  modified_base 21: mod_base = OTHER; note = 2'-fluoro guanosine
tgccctgtaccctgcctgtgg

SEQ ID NO: 1347 - RNA, 21 nt, synthetic construct
  source 1..21: mol_type = other RNA
  modified_base 1: mod_base = OTHER; note = 2'-fluoro guanosine phosphorothioate
  modified_base 2: mod_base = OTHER; note = 2'O-methyl cytidine phosphorothioate
  modified_base 3: mod_base = OTHER; note = 2'-fluoro cytidine
  modified_base 4: mod_base = OTHER; note = 2'O-methyl cytidine
  modified_base 5: mod_base = OTHER; note = 2'-fluoro uridine
  modified_base 6: mod_base = OTHER; note = 2'O-methyl guanosine
  modified_base 7: mod_base = OTHER; note = 2'-fluoro uridine
  modified_base 8: mod_base = OTHER; note = 2'O-methyl adenosine
  modified_base 9: mod_base = OTHER; note = 2'-fluoro cytidine
  modified_base 10: mod_base = OTHER; note = 2'O-methyl cytidine
  modified_base 11: mod_base = OTHER; note = 2'-fluoro cytidine
  modified_base 12: mod_base = OTHER; note = 2'O-methyl uridine
  modified_base 13: mod_base = OTHER; note = 2'-fluoro guanosine
  modified_base 14: mod_base = OTHER; note = 2'O-methyl cytidine
  modified_base 15: mod_base = OTHER; note = 2'-fluoro cytidine
  modified_base 16: mod_base = OTHER; note = 2'O-methyl uridine
  modified_base 17: mod_base = OTHER; note = 2'-fluoro guanosine
  modified_base 18: mod_base = OTHER; note = 2'O-methyl uridine
  modified_base 19: mod_base = OTHER; note = 2'-fluoro guanosine
  modified_base 20: mod_base = OTHER; note = 2'O-methyl guanosine phosphorothioate
  modified_base 21: mod_base = OTHER; note = 2'-fluoro adenosine
gccctgtaccctgcctgtgga

SEQ ID NO: 1348 - RNA, 21 nt, synthetic construct
  source 1..21: mol_type = other RNA
  modified_base 1: mod_base = OTHER; note = 2'-fluoro cytidine phosphorothioate
  modified_base 2: mod_base = OTHER; note = 2'O-methyl cytidine phosphorothioate
  modified_base 3: mod_base = OTHER; note = 2'-fluoro uridine
  modified_base 4: mod_base = OTHER; note = 2'O-methyl guanosine
  modified_base 5: mod_base = OTHER; note = 2'-fluoro cytidine
  modified_base 6: mod_base = OTHER; note = 2'O-methyl cytidine
  modified_base 7: mod_base = OTHER; note = 2'-fluoro uridine
  modified_base 8: mod_base = OTHER; note = 2'O-methyl guanosine
  modified_base 9: mod_base = OTHER; note = 2'-fluoro uridine
  modified_base 10: mod_base = OTHER; note = 2'O-methyl guanosine
  modified_base 11: mod_base = OTHER; note = 2'-fluoro guanosine
  modified_base 12: mod_base = OTHER; note = 2'O-methyl adenosine
  modified_base 13: mod_base = OTHER; note = 2'-fluoro adenosine
  modified_base 14: mod_base = OTHER; note = 2'O-methyl uridine
  modified_base 15: mod_base = OTHER; note = 2'-fluoro cytidine
  modified_base 16: mod_base = OTHER; note = 2'O-methyl uridine
  modified_base 17: mod_base = OTHER; note = 2'-fluoro guanosine
  modified_base 18: mod_base = OTHER; note = 2'O-methyl cytidine
  modified_base 19: mod_base = OTHER; note = 2'-fluoro cytidine
  modified_base 20: mod_base = OTHER; note = 2'O-methyl adenosine phosphorothioate
  modified_base 21: mod_base = OTHER; note = 2'-fluoro uridine
cctgcctgtggaatctgccat

SEQ ID NO: 1349 - RNA, 21 nt, synthetic construct
  source 1..21: mol_type = other RNA
  modified_base 1: mod_base = OTHER; note = 2'-fluoro guanosine phosphorothioate
  modified_base 2: mod_base = OTHER; note = 2'O-methyl cytidine phosphorothioate
  modified_base 3: mod_base = OTHER; note = 2'-fluoro cytidine
  modified_base 4: mod_base = OTHER; note = 2'O-methyl uridine
  modified_base 5: mod_base = OTHER; note = 2'-fluoro guanosine
  modified_base 6: mod_base = OTHER; note = 2'O-methyl uridine
  modified_base 7: mod_base = OTHER; note = 2'-fluoro guanosine
  modified_base 8: mod_base = OTHER; note = 2'O-methyl guanosine
  modified_base 9: mod_base = OTHER; note = 2'-fluoro adenosine
  modified_base 10: mod_base = OTHER; note = 2'O-methyl adenosine
  modified_base 11: mod_base = OTHER; note = 2'-fluoro uridine
  modified_base 12: mod_base = OTHER; note = 2'O-methyl cytidine
  modified_base 13: mod_base = OTHER; note = 2'-fluoro uridine
  modified_base 14: mod_base = OTHER; note = 2'O-methyl guanosine
  modified_base 15: mod_base = OTHER; note = 2'-fluoro cytidine
  modified_base 16: mod_base = OTHER; note = 2'O-methyl cytidine
  modified_base 17: mod_base = OTHER; note = 2'-fluoro adenosine
  modified_base 18: mod_base = OTHER; note = 2'O-methyl uridine
  modified_base 19: mod_base = OTHER; note = 2'-fluoro uridine
  modified_base 20: mod_base = OTHER; note = 2'O-methyl guanosine phosphorothioate
  modified_base 21: mod_base = OTHER; note = 2'-fluoro cytidine
gcctgtggaatctgccattgc

SEQ ID NO: 1350 - RNA, 21 nt, synthetic construct
  source 1..21: mol_type = other RNA
  modified_base 1: mod_base = OTHER; note = 2'-fluoro cytidine phosphorothioate
  modified_base 2: mod_base = OTHER; note = 2'O-methyl adenosine phosphorothioate
  modified_base 3: mod_base = OTHER; note = 2'-fluoro guanosine
  modified_base 4: mod_base = OTHER; note = 2'O-methyl uridine
  modified_base 5: mod_base = OTHER; note = 2'-fluoro guanosine
  modified_base 6: mod_base = OTHER; note = 2'O-methyl guanosine
  modified_base 7: mod_base = OTHER; note = 2'-fluoro guanosine
  modified_base 8: mod_base = OTHER; note = 2'O-methyl uridine
  modified_base 9: mod_base = OTHER; note = 2'-fluoro guanosine
  modified_base 10: mod_base = OTHER; note = 2'O-methyl adenosine
  modified_base 11: mod_base = OTHER; note = 2'-fluoro cytidine
  modified_base 12: mod_base = OTHER; note = 2'O-methyl cytidine
  modified_base 13: mod_base = OTHER; note = 2'-fluoro uridine
  modified_base 14: mod_base = OTHER; note = 2'O-methyl cytidine
  modified_base 15: mod_base = OTHER; note = 2'-fluoro adenosine
  modified_base 16: mod_base = OTHER; note = 2'O-methyl cytidine
  modified_base 17: mod_base = OTHER; note = 2'-fluoro adenosine
  modified_base 18: mod_base = OTHER; note = 2'O-methyl guanosine
  modified_base 19: mod_base = OTHER; note = 2'-fluoro guanosine
  modified_base 20: mod_base = OTHER; note = 2'O-methyl uridine phosphorothioate
  modified_base 21: mod_base = OTHER; note = 2'-fluoro guanosine
cagtgggtgacctcacaggtg

SEQ ID NO: 1351 - RNA, 21 nt, synthetic construct
  source 1..21: mol_type = other RNA
  modified_base 1: mod_base = OTHER; note = 2'-fluoro adenosine phosphorothioate
  modified_base 2: mod_base = OTHER; note = 2'O-methyl uridine phosphorothioate
  modified_base 3: mod_base = OTHER; note = 2'-fluoro guanosine
  modified_base 4: mod_base = OTHER; note = 2'O-methyl uridine
  modified_base 5: mod_base = OTHER; note = 2'-fluoro guanosine
  modified_base 6: mod_base = OTHER; note = 2'O-methyl uridine
  modified_base 7: mod_base = OTHER; note = 2'-fluoro cytidine
  modified_base 8: mod_base = OTHER; note = 2'O-methyl uridine
  modified_base 9: mod_base = OTHER; note = 2'-fluoro guanosine
  modified_base 10: mod_base = OTHER; note = 2'O-methyl cytidine
  modified_base 11: mod_base = OTHER; note = 2'-fluoro uridine
  modified_base 12: mod_base = OTHER; note = 2'O-methyl cytidine
  modified_base 13: mod_base = OTHER; note = 2'-fluoro cytidine
  modified_base 14: mod_base = OTHER; note = 2'O-methyl cytidine
  modified_base 15: mod_base = OTHER; note = 2'-fluoro cytidine
  modified_base 16: mod_base = OTHER; note = 2'O-methyl guanosine
  modified_base 17: mod_base = OTHER; note = 2'-fluoro cytidine
  modified_base 18: mod_base = OTHER; note = 2'O-methyl cytidine
  modified_base 19: mod_base = OTHER; note = 2'-fluoro uridine
  modified_base 20: mod_base = OTHER; note = 2'O-methyl cytidine phosphorothioate
  modified_base 21: mod_base = OTHER; note = 2'-fluoro cytidine
atgtgtctgctccccgcctcc

SEQ ID NO: 1352 - RNA, 21 nt, synthetic construct
  source 1..21: mol_type = other RNA
  modified_base 1: mod_base = OTHER; note = 2'-fluoro uridine phosphorothioate
  modified_base 2: mod_base = OTHER; note = 2'O-methyl guanosine phosphorothioate
  modified_base 3: mod_base = OTHER; note = 2'-fluoro uridine
  modified_base 4: mod_base = OTHER; note = 2'O-methyl guanosine
  modified_base 5: mod_base = OTHER; note = 2'-fluoro uridine
  modified_base 6: mod_base = OTHER; note = 2'O-methyl cytidine
  modified_base 7: mod_base = OTHER; note = 2'-fluoro uridine
  modified_base 8: mod_base = OTHER; note = 2'O-methyl guanosine
  modified_base 9: mod_base = OTHER; note = 2'-fluoro cytidine
  modified_base 10: mod_base = OTHER; note = 2'O-methyl uridine
  modified_base 11: mod_base = OTHER; note = 2'-fluoro cytidine
  modified_base 12: mod_base = OTHER; note = 2'O-methyl cytidine
  modified_base 13: mod_base = OTHER; note = 2'-fluoro cytidine
  modified_base 14: mod_base = OTHER; note = 2'O-methyl cytidine
  modified_base 15: mod_base = OTHER; note = 2'-fluoro guanosine
  modified_base 16: mod_base = OTHER; note = 2'O-methyl cytidine
  modified_base 17: mod_base = OTHER; note = 2'-fluoro cytidine
  modified_base 18: mod_base = OTHER; note = 2'O-methyl uridine
  modified_base 19: mod_base = OTHER; note = 2'-fluoro cytidine
  modified_base 20: mod_base = OTHER; note = 2'O-methyl cytidine phosphorothioate
  modified_base 21: mod_base = OTHER; note = 2'-fluoro adenosine
tgtgtctgctccccgcctcca

SEQ ID NO: 1353 - RNA, 21 nt, synthetic construct
  source 1..21: mol_type = other RNA
  modified_base 1: mod_base = OTHER; note = 2'O-methyl adenosine phosphorothioate
  modified_base 2: mod_base = OTHER; note = 2'O-methyl uridine phosphorothioate
  modified_base 3: mod_base = OTHER; note = 2'O-methyl guanosine
  modified_base 4: mod_base = OTHER; note = 2'O-methyl guanosine
  modified_base 5: mod_base = OTHER; note = 2'-fluoro adenosine
  modified_base 6: mod_base = OTHER; note = 2'O-methyl guanosine
  modified_base 7: mod_base = OTHER; note = 2'-fluoro guanosine
  modified_base 8: mod_base = OTHER; note = 2'-fluoro adenosine
  modified_base 9: mod_base = OTHER; note = 2'-fluoro guanosine
  modified_base 10: mod_base = OTHER; note = 2'O-methyl uridine
  modified_base 11: mod_base = OTHER; note = 2'O-methyl guanosine
  modified_base 12: mod_base = OTHER; note = 2'O-methyl adenosine
  modified_base 13: mod_base = OTHER; note = 2'O-methyl guanosine
  modified_base 14: mod_base = OTHER; note = 2'O-methyl uridine
  modified_base 15: mod_base = OTHER; note = 2'O-methyl guanosine
  modified_base 16: mod_base = OTHER; note = 2'O-methyl adenosine
  modified_base 17: mod_base = OTHER; note = 2'O-methyl cytidine
  modified_base 18: mod_base = OTHER; note = 2'O-methyl adenosine
  modified_base 19: mod_base = OTHER; note = 2'O-methyl adenosine phosphorothioate
  modified_base 20: mod_base = OTHER; note = 2'O-methyl uridine phosphorothioate
  modified_base 21: mod_base = OTHER; note = 2'O-methyl uridine
atggaggagtgagtgacaatt

SEQ ID NO: 1354 - RNA, 21 nt, synthetic construct
  source 1..21: mol_type = other RNA
  modified_base 1: mod_base = OTHER; note = 2'O-methyl adenosine phosphorothioate
  modified_base 2: mod_base = OTHER; note = 2'O-methyl uridine phosphorothioate
  modified_base 3: mod_base = OTHER; note = 2'O-methyl guanosine
  modified_base 4: mod_base = OTHER; note = 2'O-methyl cytidine
  modified_base 5: mod_base = OTHER; note = 2'-fluoro cytidine
  modified_base 6: mod_base = OTHER; note = 2'O-methyl uridine
  modified_base 7: mod_base = OTHER; note = 2'-fluoro uridine
  modified_base 8: mod_base = OTHER; note = 2'-fluoro guanosine
  modified_base 9: mod_base = OTHER; note = 2'-fluoro guanosine
  modified_base 10: mod_base = OTHER; note = 2'O-methyl uridine
  modified_base 11: mod_base = OTHER; note = 2'O-methyl adenosine
  modified_base 12: mod_base = OTHER; note = 2'O-methyl uridine
  modified_base 13: mod_base = OTHER; note = 2'O-methyl guanosine
  modified_base 14: mod_base = OTHER; note = 2'O-methyl uridine
  modified_base 15: mod_base = OTHER; note = 2'O-methyl uridine
  modified_base 16: mod_base = OTHER; note = 2'O-methyl cytidine
  modified_base 17: mod_base = OTHER; note = 2'O-methyl cytidine
  modified_base 18: mod_base = OTHER; note = 2'O-methyl uridine
  modified_base 19: mod_base = OTHER; note = 2'O-methyl guanosine phosphorothioate
  modified_base 20: mod_base = OTHER; note = 2'O-methyl uridine phosphorothioate
  modified_base 21: mod_base = OTHER; note = 2'O-methyl uridine
atgccttggtatgttcctgtt

SEQ ID NO: 1355 - RNA, 21 nt, synthetic construct
  source 1..21: mol_type = other RNA
  modified_base 1: mod_base = OTHER; note = 2'O-methyl adenosine phosphorothioate
  modified_base 2: mod_base = OTHER; note = 2'O-methyl cytidine phosphorothioate
  modified_base 3: mod_base = OTHER; note = 2'O-methyl guanosine
  modified_base 4: mod_base = OTHER; note = 2'O-methyl uridine
  modified_base 5: mod_base = OTHER; note = 2'-fluoro uridine
  modified_base 6: mod_base = OTHER; note = 2'O-methyl cytidine
  modified_base 7: mod_base = OTHER; note = 2'-fluoro uridine
  modified_base 8: mod_base = OTHER; note = 2'-fluoro guanosine
  modified_base 9: mod_base = OTHER; note = 2'-fluoro guanosine
  modified_base 10: mod_base = OTHER; note = 2'O-methyl uridine
  modified_base 11: mod_base = OTHER; note = 2'O-methyl guanosine
  modified_base 12: mod_base = OTHER; note = 2'O-methyl uridine
  modified_base 13: mod_base = OTHER; note = 2'O-methyl cytidine
  modified_base 14: mod_base = OTHER; note = 2'O-methyl uridine
  modified_base 15: mod_base = OTHER; note = 2'O-methyl guanosine
  modified_base 16: mod_base = OTHER; note = 2'O-methyl adenosine
  modified_base 17: mod_base = OTHER; note = 2'O-methyl cytidine
  modified_base 18: mod_base = OTHER; note = 2'O-methyl uridine
  modified_base 19: mod_base = OTHER; note = 2'O-methyl uridine phosphorothioate
  modified_base 20: mod_base = OTHER; note = 2'O-methyl uridine phosphorothioate
  modified_base 21: mod_base = OTHER; note = 2'O-methyl uridine
acgttctggtgtctgactttt

SEQ ID NO: 1356 - RNA, 21 nt, synthetic construct
  source 1..21: mol_type = other RNA
  modified_base 1: mod_base = OTHER; note = 2'O-methyl uridine phosphorothioate
  modified_base 2: mod_base = OTHER; note = 2'O-methyl guanosine phosphorothioate
  modified_base 3: mod_base = OTHER; note = 2'O-methyl uridine
  modified_base 4: mod_base = OTHER; note = 2'O-methyl cytidine
  modified_base 5: mod_base = OTHER; note = 2'-fluoro uridine
  modified_base 6: mod_base = OTHER; note = 2'O-methyl guanosine
  modified_base 7: mod_base = OTHER; note = 2'-fluoro adenosine
  modified_base 8: mod_base = OTHER; note = 2'-fluoro cytidine
  modified_base 9: mod_base = OTHER; note = 2'-fluoro uridine
  modified_base 10: mod_base = OTHER; note = 2'O-methyl uridine
  modified_base 11: mod_base = OTHER; note = 2'O-methyl uridine
  modified_base 12: mod_base = OTHER; note = 2'O-methyl cytidine
  modified_base 13: mod_base = OTHER; note = 2'O-methyl guanosine
  modified_base 14: mod_base = OTHER; note = 2'O-methyl guanosine
  modified_base 15: mod_base = OTHER; note = 2'O-methyl uridine
  modified_base 16: mod_base = OTHER; note = 2'O-methyl cytidine
  modified_base 17: mod_base = OTHER; note = 2'O-methyl cytidine
  modified_base 18: mod_base = OTHER; note = 2'O-methyl adenosine
  modified_base 19: mod_base = OTHER; note = 2'O-methyl adenosine phosphorothioate
  modified_base 20: mod_base = OTHER; note = 2'O-methyl uridine phosphorothioate
  modified_base 21: mod_base = OTHER; note = 2'O-methyl uridine
tgtctgactttcggtccaatt

SEQ ID NO: 1357 - RNA, 21 nt, synthetic construct
  source 1..21: mol_type = other RNA
  modified_base 1: mod_base = OTHER; note = 2'O-methyl guanosine phosphorothioate
  modified_base 2: mod_base = OTHER; note = 2'O-methyl guanosine phosphorothioate
  modified_base 3: mod_base = OTHER; note = 2'O-methyl uridine
  modified_base 4: mod_base = OTHER; note = 2'O-methyl cytidine
  modified_base 5: mod_base = OTHER; note = 2'-fluoro cytidine
  modified_base 6: mod_base = OTHER; note = 2'O-methyl adenosine
  modified_base 7: mod_base = OTHER; note = 2'-fluoro adenosine
  modified_base 8: mod_base = OTHER; note = 2'-fluoro adenosine
  modified_base 9: mod_base = OTHER; note = 2'-fluoro guanosine
  modified_base 10: mod_base = OTHER; note = 2'O-methyl adenosine
  modified_base 11: mod_base = OTHER; note = 2'O-methyl cytidine
  modified_base 12: mod_base = OTHER; note = 2'O-methyl guanosine
  modified_base 13: mod_base = OTHER; note = 2'O-methyl adenosine
  modified_base 14: mod_base = OTHER; note = 2'O-methyl adenosine
  modified_base 15: mod_base = OTHER; note = 2'O-methyl guanosine
  modified_base 16: mod_base = OTHER; note = 2'O-methyl uridine
  modified_base 17: mod_base = OTHER; note = 2'O-methyl cytidine
  modified_base 18: mod_base = OTHER; note = 2'O-methyl guanosine
  modified_base 19: mod_base = OTHER; note = 2'O-methyl uridine phosphorothioate
  modified_base 20: mod_base = OTHER; note = 2'O-methyl uridine phosphorothioate
  modified_base 21: mod_base = OTHER; note = 2'O-methyl uridine
ggtccaaagacgaagtcgttt

SEQ ID NO: 1358 - RNA, 21 nt, synthetic construct
  source 1..21: mol_type = other RNA
  modified_base 1: mod_base = OTHER; note = 2'O-methyl guanosine phosphorothioate
  modified_base 2: mod_base = OTHER; note = 2'O-methyl guanosine phosphorothioate
  modified_base 3: mod_base = OTHER; note = 2'O-methyl adenosine
  modified_base 4: mod_base = OTHER; note = 2'O-methyl guanosine
  modified_base 5: mod_base = OTHER; note = 2'-fluoro uridine
  modified_base 6: mod_base = OTHER; note = 2'O-methyl guanosine
  modified_base 7: mod_base = OTHER; note = 2'-fluoro adenosine
  modified_base 8: mod_base = OTHER; note = 2'-fluoro guanosine
  modified_base 9: mod_base = OTHER; note = 2'-fluoro uridine
  modified_base 10: mod_base = OTHER; note = 2'O-methyl guanosine
  modified_base 11: mod_base = OTHER; note = 2'O-methyl adenosine
  modified_base 12: mod_base = OTHER; note = 2'O-methyl cytidine
  modified_base 13: mod_base = OTHER; note = 2'O-methyl adenosine
  modified_base 14: mod_base = OTHER; note = 2'O-methyl adenosine
  modified_base 15: mod_base = OTHER; note = 2'O-methyl cytidine
  modified_base 16: mod_base = OTHER; note = 2'O-methyl guanosine
  modified_base 17: mod_base = OTHER; note = 2'O-methyl uridine
  modified_base 18: mod_base = OTHER; note = 2'O-methyl adenosine
  modified_base 19: mod_base = OTHER; note = 2'O-methyl cytidine phosphorothioate
  modified_base 20: mod_base = OTHER; note = 2'O-methyl uridine phosphorothioate
  modified_base 21: mod_base = OTHER; note = 2'O-methyl uridine
ggagtgagtgacaacgtactt

SEQ ID NO: 1359 - RNA, 21 nt, synthetic construct
  source 1..21: mol_type = other RNA
  modified_base 1: mod_base = OTHER; note = 2'O-methyl guanosine phosphorothioate
  modified_base 2: mod_base = OTHER; note = 2'O-methyl cytidine phosphorothioate
  modified_base 3: mod_base = OTHER; note = 2'O-methyl cytidine
  modified_base 4: mod_base = OTHER; note = 2'O-methyl adenosine
  modified_base 5: mod_base = OTHER; note = 2'-fluoro adenosine
  modified_base 6: mod_base = OTHER; note = 2'O-methyl adenosine
  modified_base 7: mod_base = OTHER; note = 2'-fluoro adenosine
  modified_base 8: mod_base = OTHER; note = 2'-fluoro cytidine
  modified_base 9: mod_base = OTHER; note = 2'-fluoro adenosine
  modified_base 10: mod_base = OTHER; note = 2'O-methyl adenosine
  modified_base 11: mod_base = OTHER; note = 2'O-methyl cytidine
  modified_base 12: mod_base = OTHER; note = 2'O-methyl cytidine
  modified_base 13: mod_base = OTHER; note = 2'O-methyl adenosine
  modified_base 14: mod_base = OTHER; note = 2'O-methyl uridine
  modified_base 15: mod_base = OTHER; note = 2'O-methyl cytidine
  modified_base 16: mod_base = OTHER; note = 2'O-methyl adenosine
  modified_base 17: mod_base = OTHER; note = 2'O-methyl cytidine
  modified_base 18: mod_base = OTHER; note = 2'O-methyl cytidine
  modified_base 19: mod_base = OTHER; note = 2'O-methyl guanosine phosphorothioate
  modified_base 20: mod_base = OTHER; note = 2'O-methyl uridine phosphorothioate
  modified_base 21: mod_base = OTHER; note = 2'O-methyl uridine
gccaaaacaaccatcaccgtt

SEQ ID NO: 1360 - RNA, 21 nt, synthetic construct
  source 1..21: mol_type = other RNA
  modified_base 1: mod_base = OTHER; note = 2'O-methyl cytidine phosphorothioate
  modified_base 2: mod_base = OTHER; note = 2'O-methyl uridine phosphorothioate
  modified_base 3: mod_base = OTHER; note = 2'O-methyl guanosine
  modified_base 4: mod_base = OTHER; note = 2'O-methyl guanosine
  modified_base 5: mod_base = OTHER; note = 2'-fluoro uridine
  modified_base 6: mod_base = OTHER; note = 2'O-methyl guanosine
  modified_base 7: mod_base = OTHER; note = 2'-fluoro uridine
  modified_base 8: mod_base = OTHER; note = 2'-fluoro cytidine
  modified_base 9: mod_base = OTHER; note = 2'-fluoro uridine
  modified_base 10: mod_base = OTHER; note = 2'O-methyl guanosine
  modified_base 11: mod_base = OTHER; note = 2'O-methyl adenosine
  modified_base 12: mod_base = OTHER; note = 2'O-methyl cytidine
  modified_base 13: mod_base = OTHER; note = 2'O-methyl uridine
  modified_base 14: mod_base = OTHER; note = 2'O-methyl uridine
  modified_base 15: mod_base = OTHER; note = 2'O-methyl uridine
  modified_base 16: mod_base = OTHER; note = 2'O-methyl cytidine
  modified_base 17: mod_base = OTHER; note = 2'O-methyl guanosine
  modified_base 18: mod_base = OTHER; note = 2'O-methyl guanosine
  modified_base 19: mod_base = OTHER; note = 2'O-methyl uridine phosphorothioate
  modified_base 20: mod_base = OTHER; note = 2'O-methyl uridine phosphorothioate
  modified_base 21: mod_base = OTHER; note = 2'O-methyl uridine
ctggtgtctgactttcggttt

SEQ ID NO: 1361 - RNA, 21 nt, synthetic construct
  source 1..21: mol_type = other RNA
  modified_base 1: mod_base = OTHER; note = 2'O-methyl cytidine phosphorothioate
  modified_base 2: mod_base = OTHER; note = 2'O-methyl guanosine phosphorothioate
  modified_base 3: mod_base = OTHER; note = 2'O-methyl uridine
  modified_base 4: mod_base = OTHER; note = 2'O-methyl uridine
  modified_base 5: mod_base = OTHER; note = 2'-fluoro cytidine
  modified_base 6: mod_base = OTHER; note = 2'O-methyl uridine
  modified_base 7: mod_base = OTHER; note = 2'-fluoro guanosine
  modified_base 8: mod_base = OTHER; note = 2'-fluoro guanosine
  modified_base 9: mod_base = OTHER; note = 2'-fluoro uridine
  modified_base 10: mod_base = OTHER; note = 2'O-methyl guanosine
  modified_base 11: mod_base = OTHER; note = 2'O-methyl uridine
  modified_base 12: mod_base = OTHER; note = 2'O-methyl cytidine
  modified_base 13: mod_base = OTHER; note = 2'O-methyl uridine
  modified_base 14: mod_base = OTHER; note = 2'O-methyl guanosine
  modified_base 15: mod_base = OTHER; note = 2'O-methyl adenosine
  modified_base 16: mod_base = OTHER; note = 2'O-methyl cytidine
  modified_base 17: mod_base = OTHER; note = 2'O-methyl uridine
  modified_base 18: mod_base = OTHER; note = 2'O-methyl uridine
  modified_base 19: mod_base = OTHER; note = 2'O-methyl uridine phosphorothioate
  modified_base 20: mod_base = OTHER; note = 2'O-methyl uridine phosphorothioate
  modified_base 21: mod_base = OTHER; note = 2'O-methyl uridine
cgttctggtgtctgacttttt

SEQ ID NO: 1362 - RNA, 21 nt, synthetic construct
  source 1..21: mol_type = other RNA
  modified_base 1: mod_base = OTHER; note = 2'O-methyl adenosine phosphorothioate
  modified_base 2: mod_base = OTHER; note = 2'O-methyl cytidine phosphorothioate
  modified_base 3: mod_base = OTHER; note = 2'O-methyl adenosine
  modified_base 4: mod_base = OTHER; note = 2'O-methyl uridine
  modified_base 5: mod_base = OTHER; note = 2'-fluoro cytidine
  modified_base 6: mod_base = OTHER; note = 2'O-methyl uridine
  modified_base 7: mod_base = OTHER; note = 2'-fluoro guanosine
  modified_base 8: mod_base = OTHER; note = 2'-fluoro cytidine
  modified_base 9: mod_base = OTHER; note = 2'-fluoro cytidine
  modified_base 10: mod_base = OTHER; note = 2'O-methyl cytidine
  modified_base 11: mod_base = OTHER; note = 2'O-methyl uridine
  modified_base 12: mod_base = OTHER; note = 2'O-methyl adenosine
  modified_base 13: mod_base = OTHER; note = 2'O-methyl adenosine
  modified_base 14: mod_base = OTHER; note = 2'O-methyl adenosine
  modified_base 15: mod_base = OTHER; note = 2'O-methyl guanosine
  modified_base 16: mod_base = OTHER; note = 2'O-methyl uridine
  modified_base 17: mod_base = OTHER; note = 2'O-methyl cytidine
  modified_base 18: mod_base = OTHER; note = 2'O-methyl adenosine
  modified_base 19: mod_base = OTHER; note = 2'O-methyl adenosine phosphorothioate
  modified_base 20: mod_base = OTHER; note = 2'O-methyl uridine phosphorothioate
  modified_base 21: mod_base = OTHER; note = 2'O-methyl uridine
acatctgccctaaagtcaatt

SEQ ID NO: 1363 - RNA, 21 nt, synthetic construct
  source 1..21: mol_type = other RNA
  modified_base 1: mod_base = OTHER; note = 2'O-methyl guanosine phosphorothioate
  modified_base 2: mod_base = OTHER; note = 2'O-methyl guanosine phosphorothioate
  modified_base 3: mod_base = OTHER; note = 2'O-methyl adenosine
  modified_base 4: mod_base = OTHER; note = 2'O-methyl adenosine
  modified_base 5: mod_base = OTHER; note = 2'-fluoro adenosine
  modified_base 6: mod_base = OTHER; note = 2'O-methyl adenosine
  modified_base 7: mod_base = OTHER; note = 2'-fluoro cytidine
  modified_base 8: mod_base = OTHER; note = 2'-fluoro guanosine
  modified_base 9: mod_base = OTHER; note = 2'-fluoro uridine
  modified_base 10: mod_base = OTHER; note = 2'O-methyl uridine
  modified_base 11: mod_base = OTHER; note = 2'O-methyl cytidine
  modified_base 12: mod_base = OTHER; note = 2'O-methyl uridine
  modified_base 13: mod_base = OTHER; note = 2'O-methyl guanosine
  modified_base 14: mod_base = OTHER; note = 2'O-methyl guanosine
  modified_base 15: mod_base = OTHER; note = 2'O-methyl uridine
  modified_base 16: mod_base = OTHER; note = 2'O-methyl guanosine
  modified_base 17: mod_base = OTHER; note = 2'O-methyl uridine
  modified_base 18: mod_base = OTHER; note = 2'O-methyl cytidine
  modified_base 19: mod_base = OTHER; note = 2'O-methyl uridine phosphorothioate
  modified_base 20: mod_base = OTHER; note = 2'O-methyl uridine phosphorothioate
  modified_base 21: mod_base = OTHER; note = 2'O-methyl uridine
ggaaaacgttctggtgtcttt

SEQ ID NO: 1364 - RNA, 21 nt, synthetic construct
  source 1..21: mol_type = other RNA
  modified_base 1: mod_base = OTHER; note = 2'O-methyl guanosine phosphorothioate
  modified_base 2: mod_base = OTHER; note = 2'O-methyl uridine phosphorothioate
  modified_base 3: mod_base = OTHER; note = 2'O-methyl cytidine
  modified_base 4: mod_base = OTHER; note = 2'O-methyl uridine
  modified_base 5: mod_base = OTHER; note = 2'-fluoro guanosine
  modified_base 6: mod_base = OTHER; note = 2'O-methyl adenosine
  modified_base 7: mod_base = OTHER; note = 2'-fluoro cytidine
  modified_base 8: mod_base = OTHER; note = 2'-fluoro uridine
  modified_base 9: mod_base = OTHER; note = 2'-fluoro uridine
  modified_base 10: mod_base = OTHER; note = 2'O-methyl uridine
  modified_base 11: mod_base = OTHER; note = 2'O-methyl cytidine
  modified_base 12: mod_base = OTHER; note = 2'O-methyl guanosine
  modified_base 13: mod_base = OTHER; note = 2'O-methyl guanosine
  modified_base 14: mod_base = OTHER; note = 2'O-methyl uridine
  modified_base 15: mod_base = OTHER; note = 2'O-methyl cytidine
  modified_base 16: mod_base = OTHER; note = 2'O-methyl cytidine
  modified_base 17: mod_base = OTHER; note = 2'O-methyl adenosine
  modified_base 18: mod_base = OTHER; note = 2'O-methyl adenosine
  modified_base 19: mod_base = OTHER; note = 2'O-methyl adenosine phosphorothioate
  modified_base 20: mod_base = OTHER; note = 2'O-methyl uridine phosphorothioate
  modified_base 21: mod_base = OTHER; note = 2'O-methyl uridine
gtctgactttcggtccaaatt

SEQ ID NO: 1365 - RNA, 21 nt, synthetic construct
  source 1..21: mol_type = other RNA
  modified_base 1: mod_base = OTHER; note = 2'O-methyl adenosine phosphorothioate
  modified_base 2: mod_base = OTHER; note = 2'O-methyl adenosine phosphorothioate
  modified_base 3: mod_base = OTHER; note = 2'O-methyl adenosine
  modified_base 4: mod_base = OTHER; note = 2'O-methyl cytidine
  modified_base 5: mod_base = OTHER; note = 2'-fluoro guanosine
  modified_base 6: mod_base = OTHER; note = 2'O-methyl uridine
  modified_base 7: mod_base = OTHER; note = 2'-fluoro uridine
  modified_base 8: mod_base = OTHER; note = 2'-fluoro cytidine
  modified_base 9: mod_base = OTHER; note = 2'-fluoro uridine
  modified_base 10: mod_base = OTHER; note = 2'O-methyl guanosine
  modified_base 11: mod_base = OTHER; note = 2'O-methyl guanosine
  modified_base 12: mod_base = OTHER; note = 2'O-methyl uridine
  modified_base 13: mod_base = OTHER; note = 2'O-methyl guanosine
  modified_base 14: mod_base = OTHER; note = 2'O-methyl uridine
  modified_base 15: mod_base = OTHER; note = 2'O-methyl cytidine
  modified_base 16: mod_base = OTHER; note = 2'O-methyl uridine
  modified_base 17: mod_base = OTHER; note = 2'O-methyl guanosine
  modified_base 18: mod_base = OTHER; note = 2'O-methyl adenosine
  modified_base 19: mod_base = OTHER; note = 2'O-methyl cytidine phosphorothioate
  modified_base 20: mod_base = OTHER; note = 2'O-methyl uridine phosphorothioate
  modified_base 21: mod_base = OTHER; note = 2'O-methyl uridine
aaacgttctggtgtctgactt

SEQ ID NO: 1366 - RNA, 21 nt, synthetic construct
  source 1..21: mol_type = other RNA
  modified_base 1: mod_base = OTHER; note = 2'O-methyl guanosine phosphorothioate
  modified_base 2: mod_base = OTHER; note = 2'O-methyl cytidine phosphorothioate
  modified_base 3: mod_base = OTHER; note = 2'O-methyl cytidine
  modified_base 4: mod_base = OTHER; note = 2'O-methyl uridine
  modified_base 5: mod_base = OTHER; note = 2'-fluoro guanosine
  modified_base 6: mod_base = OTHER; note = 2'O-methyl uridine
  modified_base 7: mod_base = OTHER; note = 2'-fluoro guanosine
  modified_base 8: mod_base = OTHER; note = 2'-fluoro guanosine
  modified_base 9: mod_base = OTHER; note = 2'-fluoro adenosine
  modified_base 10: mod_base = OTHER; note = 2'O-methyl adenosine
  modified_base 11: mod_base = OTHER; note = 2'O-methyl uridine
  modified_base 12: mod_base = OTHER; note = 2'O-methyl cytidine
  modified_base 13: mod_base = OTHER; note = 2'O-methyl uridine
  modified_base 14: mod_base = OTHER; note = 2'O-methyl guanosine
  modified_base 15: mod_base = OTHER; note = 2'O-methyl cytidine
  modified_base 16: mod_base = OTHER; note = 2'O-methyl cytidine
  modified_base 17: mod_base = OTHER; note = 2'O-methyl adenosine
  modified_base 18: mod_base = OTHER; note = 2'O-methyl uridine
  modified_base 19: mod_base = OTHER; note = 2'O-methyl uridine phosphorothioate
  modified_base 20: mod_base = OTHER; note = 2'O-methyl uridine phosphorothioate
  modified_base 21: mod_base = OTHER; note = 2'O-methyl uridine
gcctgtggaatctgccatttt

SEQ ID NO: 1367 - RNA, 21 nt, synthetic construct
  source 1..21: mol_type = other RNA
  modified_base 1: mod_base = OTHER; note = 2'O-methyl cytidine phosphorothioate
  modified_base 2: mod_base = OTHER; note = 2'O-methyl cytidine phosphorothioate
  modified_base 3: mod_base = OTHER; note = 2'O-methyl cytidine
  modified_base 4: mod_base = OTHER; note = 2'O-methyl adenosine
  modified_base 5: mod_base = OTHER; note = 2'-fluoro uridine
  modified_base 6: mod_base = OTHER; note = 2'O-methyl uridine
  modified_base 7: mod_base = OTHER; note = 2'-fluoro adenosine
  modified_base 8: mod_base = OTHER; note = 2'-fluoro guanosine
  modified_base 9: mod_base = OTHER; note = 2'-fluoro guanosine
  modified_base 10: mod_base = OTHER; note = 2'O-methyl adenosine
  modified_base 11: mod_base = OTHER; note = 2'O-methyl uridine
  modified_base 12: mod_base = OTHER; note = 2'O-methyl adenosine
  modified_base 13: mod_base = OTHER; note = 2'O-methyl adenosine
  modified_base 14: mod_base = OTHER; note = 2'O-methyl uridine
  modified_base 15: mod_base = OTHER; note = 2'O-methyl guanosine
  modified_base 16: mod_base = OTHER; note = 2'O-methyl uridine
  modified_base 17: mod_base = OTHER; note = 2'O-methyl cytidine
  modified_base 18: mod_base = OTHER; note = 2'O-methyl uridine
  modified_base 19: mod_base = OTHER; note = 2'O-methyl uridine phosphorothioate
  modified_base 20: mod_base = OTHER; note = 2'O-methyl uridine phosphorothioate
  modified_base 21: mod_base = OTHER; note = 2'O-methyl uridine
cccattaggataatgtctttt

SEQ ID NO: 1368 - RNA, 21 nt, synthetic construct
  source 1..21: mol_type = other RNA
  modified_base 1: mod_base = OTHER; note = 2'O-methyl guanosine phosphorothioate
  modified_base 2: mod_base = OTHER; note = 2'O-methyl uridine phosphorothioate
  modified_base 3: mod_base = OTHER; note = 2'O-methyl guanosine
  modified_base 4: mod_base = OTHER; note = 2'O-methyl guanosine
  modified_base 5: mod_base = OTHER; note = 2'-fluoro adenosine
  modified_base 6: mod_base = OTHER; note = 2'O-methyl uridine
  modified_base 7: mod_base = OTHER; note = 2'-fluoro guanosine
  modified_base 8: mod_base = OTHER; note = 2'-fluoro cytidine
  modified_base 9: mod_base = OTHER; note = 2'-fluoro cytidine
  modified_base 10: mod_base = OTHER; note = 2'O-methyl uridine
  modified_base 11: mod_base = OTHER; note = 2'O-methyl uridine
  modified_base 12: mod_base = OTHER; note = 2'O-methyl guanosine
  modified_base 13: mod_base = OTHER; note = 2'O-methyl guanosine
  modified_base 14: mod_base = OTHER; note = 2'O-methyl uridine
  modified_base 15: mod_base = OTHER; note = 2'O-methyl adenosine
  modified_base 16: mod_base = OTHER; note = 2'O-methyl uridine
  modified_base 17: mod_base = OTHER; note = 2'O-methyl guanosine
  modified_base 18: mod_base = OTHER; note = 2'O-methyl uridine
  modified_base 19: mod_base = OTHER; note = 2'O-methyl uridine phosphorothioate
  modified_base 20: mod_base = OTHER; note = 2'O-methyl uridine phosphorothioate
  modified_base 21: mod_base = OTHER; note = 2'O-methyl uridine
gtggatgccttggtatgtttt

SEQ ID NO: 1369 - RNA, 21 nt, synthetic construct
  source 1..21: mol_type = other RNA
  modified_base 1: mod_base = OTHER; note = 2'O-methyl cytidine phosphorothioate
  modified_base 2: mod_base = OTHER; note = 2'O-methyl adenosine phosphorothioate
  modified_base 3: mod_base = OTHER; note = 2'O-methyl adenosine
  modified_base 4: mod_base = OTHER; note = 2'O-methyl adenosine
  modified_base 5: mod_base = OTHER; note = 2'-fluoro guanosine
  modified_base 6: mod_base = OTHER; note = 2'O-methyl adenosine
  modified_base 7: mod_base = OTHER; note = 2'-fluoro cytidine
  modified_base 8: mod_base = OTHER; note = 2'-fluoro guanosine
  modified_base 9: mod_base = OTHER; note = 2'-fluoro adenosine
  modified_base 10: mod_base = OTHER; note = 2'O-methyl adenosine
  modified_base 11: mod_base = OTHER; note = 2'O-methyl guanosine
  modified_base 12: mod_base = OTHER; note = 2'O-methyl uridine
  modified_base 13: mod_base = OTHER; note = 2'O-methyl cytidine
  modified_base 14: mod_base = OTHER; note = 2'O-methyl guanosine
  modified_base 15: mod_base = OTHER; note = 2'O-methyl uridine
  modified_base 16: mod_base = OTHER; note = 2'O-methyl guanosine
  modified_base 17: mod_base = OTHER; note = 2'O-methyl guanosine
  modified_base 18: mod_base = OTHER; note = 2'O-methyl adenosine
  modified_base 19: mod_base = OTHER; note = 2'O-methyl uridine phosphorothioate
  modified_base 20: mod_base = OTHER; note = 2'O-methyl uridine phosphorothioate
  modified_base 21: mod_base = OTHER; note = 2'O-methyl uridine
caaagacgaagtcgtggattt

SEQ ID NO: 1370 - RNA, 21 nt, synthetic construct
  source 1..21: mol_type = other RNA
  modified_base 1: mod_base = OTHER; note = 2'O-methyl uridine phosphorothioate
  modified_base 2: mod_base = OTHER; note = 2'O-methyl guanosine phosphorothioate
  modified_base 3: mod_base = OTHER; note = 2'O-methyl guanosine
  modified_base 4: mod_base = OTHER; note = 2'O-methyl adenosine
  modified_base 5: mod_base = OTHER; note = 2'-fluoro uridine
  modified_base 6: mod_base = OTHER; note = 2'O-methyl guanosine
  modified_base 7: mod_base = OTHER; note = 2'-fluoro cytidine
  modified_base 8: mod_base = OTHER; note = 2'-fluoro cytidine
  modified_base 9: mod_base = OTHER; note = 2'-fluoro uridine
  modified_base 10: mod_base = OTHER; note = 2'O-methyl uridine
  modified_base 11: mod_base = OTHER; note = 2'O-methyl guanosine
  modified_base 12: mod_base = OTHER; note = 2'O-methyl guanosine
  modified_base 13: mod_base = OTHER; note = 2'O-methyl uridine
  modified_base 14: mod_base = OTHER; note = 2'O-methyl adenosine
  modified_base 15: mod_base = OTHER; note = 2'O-methyl uridine
  modified_base 16: mod_base = OTHER; note = 2'O-methyl guanosine
  modified_base 17: mod_base = OTHER; note = 2'O-methyl uridine
  modified_base 18: mod_base = OTHER; note = 2'O-methyl uridine
  modified_base 19: mod_base = OTHER; note = 2'O-methyl cytidine phosphorothioate
  modified_base 20: mod_base = OTHER; note = 2'O-methyl uridine phosphorothioate
  modified_base 21: mod_base = OTHER; note = 2'O-methyl uridine
tggatgccttggtatgttctt

SEQ ID NO: 1371 - RNA, 21 nt, synthetic construct
  source 1..21: mol_type = other RNA
  modified_base 1: mod_base = OTHER; note = 2'O-methyl adenosine phosphorothioate
  modified_base 2: mod_base = OTHER; note = 2'O-methyl uridine phosphorothioate
  modified_base 3: mod_base = OTHER; note = 2'O-methyl guanosine
  modified_base 4: mod_base = OTHER; note = 2'O-methyl guanosine
  modified_base 5: mod_base = OTHER; note = 2'-fluoro adenosine
  modified_base 6: mod_base = OTHER; note = 2'O-methyl guanosine
  modified_base 7: mod_base = OTHER; note = 2'-fluoro guanosine
  modified_base 8: mod_base = OTHER; note = 2'-fluoro adenosine
  modified_base 9: mod_base = OTHER; note = 2'-fluoro guanosine
  modified_base 10: mod_base = OTHER; note = 2'O-methyl uridine
  modified_base 11: mod_base = OTHER; note = 2'O-methyl guanosine
  modified_base 12: mod_base = OTHER; note = 2'O-methyl adenosine
  modified_base 13: mod_base = OTHER; note = 2'O-methyl guanosine
  modified_base 14: mod_base = OTHER; note = 2'O-methyl uridine
  modified_base 15: mod_base = OTHER; note = 2'O-methyl guanosine
  modified_base 16: mod_base = OTHER; note = 2'O-methyl adenosine
  modified_base 17: mod_base = OTHER; note = 2'O-methyl cytidine
  modified_base 18: mod_base = OTHER; note = 2'O-methyl adenosine
  modified_base 19: mod_base = OTHER; note = 2'O-methyl adenosine phosphorothioate
  modified_base 20: mod_base = OTHER; note = 2'O-methyl uridine phosphorothioate
  modified_base 21: mod_base = OTHER; note = 2'O-methyl uridine
atggaggagtgagtgacaatt

SEQ ID NO: 1372 - RNA, 21 nt, synthetic construct
  source 1..21: mol_type = other RNA
  modified_base 1: mod_base = OTHER; note = 2'O-methyl adenosine phosphorothioate
  modified_base 2: mod_base = OTHER; note = 2'O-methyl uridine phosphorothioate
  modified_base 3: mod_base = OTHER; note = 2'O-methyl guanosine
  modified_base 4: mod_base = OTHER; note = 2'O-methyl cytidine
  modified_base 5: mod_base = OTHER; note = 2'-fluoro cytidine
  modified_base 6: mod_base = OTHER; note = 2'O-methyl uridine
  modified_base 7: mod_base = OTHER; note = 2'-fluoro uridine
  modified_base 8: mod_base = OTHER; note = 2'-fluoro guanosine
  modified_base 9: mod_base = OTHER; note = 2'-fluoro guanosine
  modified_base 10: mod_base = OTHER; note = 2'O-methyl uridine
  modified_base 11: mod_base = OTHER; note = 2'O-methyl adenosine
  modified_base 12: mod_base = OTHER; note = 2'O-methyl uridine
  modified_base 13: mod_base = OTHER; note = 2'O-methyl guanosine
  modified_base 14: mod_base = OTHER; note = 2'O-methyl uridine
  modified_base 15: mod_base = OTHER; note = 2'O-methyl uridine
  modified_base 16: mod_base = OTHER; note = 2'O-methyl cytidine
  modified_base 17: mod_base = OTHER; note = 2'O-methyl cytidine
  modified_base 18: mod_base = OTHER; note = 2'O-methyl uridine
  modified_base 19: mod_base = OTHER; note = 2'O-methyl guanosine phosphorothioate
  modified_base 20: mod_base = OTHER; note = 2'O-methyl uridine phosphorothioate
  modified_base 21: mod_base = OTHER; note = 2'O-methyl uridine
atgccttggtatgttcctgtt

SEQ ID NO: 1373 - RNA, 21 nt, synthetic construct
  source 1..21: mol_type = other RNA
  modified_base 1: mod_base = OTHER; note = 2'O-methyl adenosine phosphorothioate
  modified_base 2: mod_base = OTHER; note = 2'O-methyl cytidine phosphorothioate
  modified_base 3: mod_base = OTHER; note = 2'O-methyl guanosine
  modified_base 4: mod_base = OTHER; note = 2'O-methyl uridine
  modified_base 5: mod_base = OTHER; note = 2'-fluoro uridine
  modified_base 6: mod_base = OTHER; note = 2'O-methyl cytidine
  modified_base 7: mod_base = OTHER; note = 2'-fluoro uridine
  modified_base 8: mod_base = OTHER; note = 2'-fluoro guanosine
  modified_base 9: mod_base = OTHER; note = 2'-fluoro guanosine
  modified_base 10: mod_base = OTHER; note = 2'O-methyl uridine
  modified_base 11: mod_base = OTHER; note = 2'O-methyl guanosine
  modified_base 12: mod_base = OTHER; note = 2'O-methyl uridine
  modified_base 13: mod_base = OTHER; note = 2'O-methyl cytidine
  modified_base 14: mod_base = OTHER; note = 2'O-methyl uridine
  modified_base 15: mod_base = OTHER; note = 2'O-methyl guanosine
  modified_base 16: mod_base = OTHER; note = 2'O-methyl adenosine
  modified_base 17: mod_base = OTHER; note = 2'O-methyl cytidine
  modified_base 18: mod_base = OTHER; note = 2'O-methyl uridine
  modified_base 19: mod_base = OTHER; note = 2'O-methyl uridine phosphorothioate
  modified_base 20: mod_base = OTHER; note = 2'O-methyl uridine phosphorothioate
  modified_base 21: mod_base = OTHER; note = 2'O-methyl uridine
acgttctggtgtctgactttt

SEQ ID NO: 1374 - RNA, 21 nt, synthetic construct
  source 1..21: mol_type = other RNA
  modified_base 1: mod_base = OTHER; note = 2'O-methyl uridine phosphorothioate
  modified_base 2: mod_base = OTHER; note = 2'O-methyl guanosine phosphorothioate
  modified_base 3: mod_base = OTHER; note = 2'O-methyl uridine
  modified_base 4: mod_base = OTHER; note = 2'O-methyl cytidine
  modified_base 5: mod_base = OTHER; note = 2'-fluoro uridine
  modified_base 6: mod_base = OTHER; note = 2'O-methyl guanosine
  modified_base 7: mod_base = OTHER; note = 2'-fluoro adenosine
  modified_base 8: mod_base = OTHER; note = 2'-fluoro cytidine
  modified_base 9: mod_base = OTHER; note = 2'-fluoro uridine
  modified_base 10: mod_base = OTHER; note = 2'O-methyl uridine
  modified_base 11: mod_base = OTHER; note = 2'O-methyl uridine
  modified_base 12: mod_base = OTHER; note = 2'O-methyl cytidine
  modified_base 13: mod_base = OTHER; note = 2'O-methyl guanosine
  modified_base 14: mod_base = OTHER; note = 2'O-methyl guanosine
  modified_base 15: mod_base = OTHER; note = 2'O-methyl uridine
  modified_base 16: mod_base = OTHER; note = 2'O-methyl cytidine
  modified_base 17: mod_base = OTHER; note = 2'O-methyl cytidine
  modified_base 18: mod_base = OTHER; note = 2'O-methyl adenosine
  modified_base 19: mod_base = OTHER; note = 2'O-methyl adenosine phosphorothioate
  modified_base 20: mod_base = OTHER; note = 2'O-methyl uridine phosphorothioate
  modified_base 21: mod_base = OTHER; note = 2'O-methyl uridine
tgtctgactttcggtccaatt

SEQ ID NO: 1375 - RNA, 21 nt, synthetic construct
  source 1..21: mol_type = other RNA
  modified_base 1: mod_base = OTHER; note = 2'O-methyl guanosine phosphorothioate
  modified_base 2: mod_base = OTHER; note = 2'O-methyl guanosine phosphorothioate
  modified_base 3: mod_base = OTHER; note = 2'O-methyl uridine
  modified_base 4: mod_base = OTHER; note = 2'O-methyl cytidine
  modified_base 5: mod_base = OTHER; note = 2'-fluoro cytidine
  modified_base 6: mod_base = OTHER; note = 2'O-methyl adenosine
  modified_base 7: mod_base = OTHER; note = 2'-fluoro adenosine
  modified_base 8: mod_base = OTHER; note = 2'-fluoro adenosine
  modified_base 9: mod_base = OTHER; note = 2'-fluoro guanosine
  modified_base 10: mod_base = OTHER; note = 2'O-methyl adenosine
  modified_base 11: mod_base = OTHER; note = 2'O-methyl cytidine
  modified_base 12: mod_base = OTHER; note = 2'O-methyl guanosine
  modified_base 13: mod_base = OTHER; note = 2'O-methyl adenosine
  modified_base 14: mod_base = OTHER; note = 2'O-methyl adenosine
  modified_base 15: mod_base = OTHER; note = 2'O-methyl guanosine
  modified_base 16: mod_base = OTHER; note = 2'O-methyl uridine
  modified_base 17: mod_base = OTHER; note = 2'O-methyl cytidine
  modified_base 18: mod_base = OTHER; note = 2'O-methyl guanosine
  modified_base 19: mod_base = OTHER; note = 2'O-methyl uridine phosphorothioate
  modified_base 20: mod_base = OTHER; note = 2'O-methyl uridine phosphorothioate
  modified_base 21: mod_base = OTHER; note = 2'O-methyl uridine
ggtccaaagacgaagtcgttt

SEQ ID NO: 1376 - RNA, 21 nt, synthetic construct
  source 1..21: mol_type = other RNA
  modified_base 1: mod_base = OTHER; note = 2'O-methyl guanosine phosphorothioate
  modified_base 2: mod_base = OTHER; note = 2'O-methyl guanosine phosphorothioate
  modified_base 3: mod_base = OTHER; note = 2'O-methyl adenosine
  modified_base 4: mod_base = OTHER; note = 2'O-methyl guanosine
  modified_base 5: mod_base = OTHER; note = 2'-fluoro uridine
  modified_base 6: mod_base = OTHER; note = 2'O-methyl guanosine
  modified_base 7: mod_base = OTHER; note = 2'-fluoro adenosine
  modified_base 8: mod_base = OTHER; note = 2'-fluoro guanosine
  modified_base 9: mod_base = OTHER; note = 2'-fluoro uridine
  modified_base 10: mod_base = OTHER; note = 2'O-methyl guanosine
  modified_base 11: mod_base = OTHER; note = 2'O-methyl adenosine
  modified_base 12: mod_base = OTHER; note = 2'O-methyl cytidine
  modified_base 13: mod_base = OTHER; note = 2'O-methyl adenosine
  modified_base 14: mod_base = OTHER; note = 2'O-methyl adenosine
  modified_base 15: mod_base = OTHER; note = 2'O-methyl cytidine
  modified_base 16: mod_base = OTHER; note = 2'O-methyl guanosine
  modified_base 17: mod_base = OTHER; note = 2'O-methyl uridine
  modified_base 18: mod_base = OTHER; note = 2'O-methyl adenosine
  modified_base 19: mod_base = OTHER; note = 2'O-methyl cytidine phosphorothioate
  modified_base 20: mod_base = OTHER; note = 2'O-methyl uridine phosphorothioate
  modified_base 21: mod_base = OTHER; note = 2'O-methyl uridine
ggagtgagtgacaacgtactt

SEQ ID NO: 1377 - RNA, 21 nt, synthetic construct
  source 1..21: mol_type = other RNA
  modified_base 1: mod_base = OTHER; note = 2'O-methyl guanosine phosphorothioate
  modified_base 2: mod_base = OTHER; note = 2'O-methyl cytidine phosphorothioate
  modified_base 3: mod_base = OTHER; note = 2'O-methyl cytidine
  modified_base 4: mod_base = OTHER; note = 2'O-methyl adenosine
  modified_base 5: mod_base = OTHER; note = 2'-fluoro adenosine
  modified_base 6: mod_base = OTHER; note = 2'O-methyl adenosine
  modified_base 7: mod_base = OTHER; note = 2'-fluoro adenosine
  modified_base 8: mod_base = OTHER; note = 2'-fluoro cytidine
  modified_base 9: mod_base = OTHER; note = 2'-fluoro adenosine
  modified_base 10: mod_base = OTHER; note = 2'O-methyl adenosine
  modified_base 11: mod_base = OTHER; note = 2'O-methyl cytidine
  modified_base 12: mod_base = OTHER; note = 2'O-methyl cytidine
  modified_base 13: mod_base = OTHER; note = 2'O-methyl adenosine
  modified_base 14: mod_base = OTHER; note = 2'O-methyl uridine
  modified_base 15: mod_base = OTHER; note = 2'O-methyl cytidine
  modified_base 16: mod_base = OTHER; note = 2'O-methyl adenosine
  modified_base 17: mod_base = OTHER; note = 2'O-methyl cytidine
  modified_base 18: mod_base = OTHER; note = 2'O-methyl cytidine
  modified_base 19: mod_base = OTHER; note = 2'O-methyl guanosine phosphorothioate
  modified_base 20: mod_base = OTHER; note = 2'O-methyl uridine phosphorothioate
  modified_base 21: mod_base = OTHER; note = 2'O-methyl uridine
gccaaaacaaccatcaccgtt

SEQ ID NO: 1378 - RNA, 21 nt, synthetic construct
  source 1..21: mol_type = other RNA
  modified_base 1: mod_base = OTHER; note = 2'O-methyl cytidine phosphorothioate
  modified_base 2: mod_base = OTHER; note = 2'O-methyl uridine phosphorothioate
  modified_base 3: mod_base = OTHER; note = 2'O-methyl guanosine
  modified_base 4: mod_base = OTHER; note = 2'O-methyl guanosine
  modified_base 5: mod_base = OTHER; note = 2'-fluoro uridine
  modified_base 6: mod_base = OTHER; note = 2'O-methyl guanosine
  modified_base 7: mod_base = OTHER; note = 2'-fluoro uridine
  modified_base 8: mod_base = OTHER; note = 2'-fluoro cytidine
  modified_base 9: mod_base = OTHER; note = 2'-fluoro uridine
  modified_base 10: mod_base = OTHER; note = 2'O-methyl guanosine
  modified_base 11: mod_base = OTHER; note = 2'O-methyl adenosine
  modified_base 12: mod_base = OTHER; note = 2'O-methyl cytidine
  modified_base 13: mod_base = OTHER; note = 2'O-methyl uridine
  modified_base 14: mod_base = OTHER; note = 2'O-methyl uridine
  modified_base 15: mod_base = OTHER; note = 2'O-methyl uridine
  modified_base 16: mod_base = OTHER; note = 2'O-methyl cytidine
  modified_base 17: mod_base = OTHER; note = 2'O-methyl guanosine
  modified_base 18: mod_base = OTHER; note = 2'O-methyl guanosine
  modified_base 19: mod_base = OTHER; note = 2'O-methyl uridine phosphorothioate
  modified_base 20: mod_base = OTHER; note = 2'O-methyl uridine phosphorothioate
  modified_base 21: mod_base = OTHER; note = 2'O-methyl uridine
ctggtgtctgactttcggttt

SEQ ID NO: 1379 - RNA, 21 nt, synthetic construct
  source 1..21: mol_type = other RNA
  modified_base 1: mod_base = OTHER; note = 2'O-methyl cytidine phosphorothioate
  modified_base 2: mod_base = OTHER; note = 2'O-methyl guanosine phosphorothioate
  modified_base 3: mod_base = OTHER; note = 2'O-methyl uridine
  modified_base 4: mod_base = OTHER; note = 2'O-methyl uridine
  modified_base 5: mod_base = OTHER; note = 2'-fluoro cytidine
  modified_base 6: mod_base = OTHER; note = 2'O-methyl uridine
  modified_base 7: mod_base = OTHER; note = 2'-fluoro guanosine
  modified_base 8: mod_base = OTHER; note = 2'-fluoro guanosine
  modified_base 9: mod_base = OTHER; note = 2'-fluoro uridine
  modified_base 10: mod_base = OTHER; note = 2'O-methyl guanosine
  modified_base 11: mod_base = OTHER; note = 2'O-methyl uridine
  modified_base 12: mod_base = OTHER; note = 2'O-methyl cytidine
  modified_base 13: mod_base = OTHER; note = 2'O-methyl uridine
  modified_base 14: mod_base = OTHER; note = 2'O-methyl guanosine
  modified_base 15: mod_base = OTHER; note = 2'O-methyl adenosine
  modified_base 16: mod_base = OTHER; note = 2'O-methyl cytidine
  modified_base 17: mod_base = OTHER; note = 2'O-methyl uridine
  modified_base 18: mod_base = OTHER; note = 2'O-methyl uridine
  modified_base 19: mod_base = OTHER; note = 2'O-methyl uridine phosphorothioate
  modified_base 20: mod_base = OTHER; note = 2'O-methyl uridine phosphorothioate
  modified_base 21: mod_base = OTHER; note = 2'O-methyl uridine
cgttctggtgtctgacttttt

SEQ ID NO: 1380 - RNA, 21 nt, synthetic construct
  source 1..21: mol_type = other RNA
  modified_base 1: mod_base = OTHER; note = 2'O-methyl adenosine phosphorothioate
  modified_base 2: mod_base = OTHER; note = 2'O-methyl cytidine phosphorothioate
  modified_base 3: mod_base = OTHER; note = 2'O-methyl adenosine
  modified_base 4: mod_base = OTHER; note = 2'O-methyl uridine
  modified_base 5: mod_base = OTHER; note = 2'-fluoro cytidine
  modified_base 6: mod_base = OTHER; note = 2'O-methyl uridine
  modified_base 7: mod_base = OTHER; note = 2'-fluoro guanosine
  modified_base 8: mod_base = OTHER; note = 2'-fluoro cytidine
  modified_base 9: mod_base = OTHER; note = 2'-fluoro cytidine
  modified_base 10: mod_base = OTHER; note = 2'O-methyl cytidine
  modified_base 11: mod_base = OTHER; note = 2'O-methyl uridine
  modified_base 12: mod_base = OTHER; note = 2'O-methyl adenosine
  modified_base 13: mod_base = OTHER; note = 2'O-methyl adenosine
  modified_base 14: mod_base = OTHER; note = 2'O-methyl adenosine
  modified_base 15: mod_base = OTHER; note = 2'O-methyl guanosine
  modified_base 16: mod_base = OTHER; note = 2'O-methyl uridine
  modified_base 17: mod_base = OTHER; note = 2'O-methyl cytidine
  modified_base 18: mod_base = OTHER; note = 2'O-methyl adenosine
  modified_base 19: mod_base = OTHER; note = 2'O-methyl adenosine phosphorothioate
  modified_base 20: mod_base = OTHER; note = 2'O-methyl uridine phosphorothioate
  modified_base 21: mod_base = OTHER; note = 2'O-methyl uridine
acatctgccctaaagtcaatt

SEQ ID NO: 1381 - RNA, 21 nt, synthetic construct
  source 1..21: mol_type = other RNA
  modified_base 1: mod_base = OTHER; note = 2'O-methyl guanosine phosphorothioate
  modified_base 2: mod_base = OTHER; note = 2'O-methyl guanosine phosphorothioate
  modified_base 3: mod_base = OTHER; note = 2'O-methyl adenosine
  modified_base 4: mod_base = OTHER; note = 2'O-methyl adenosine
  modified_base 5: mod_base = OTHER; note = 2'-fluoro adenosine
  modified_base 6: mod_base = OTHER; note = 2'O-methyl adenosine
  modified_base 7: mod_base = OTHER; note = 2'-fluoro cytidine
  modified_base 8: mod_base = OTHER; note = 2'-fluoro guanosine
  modified_base 9: mod_base = OTHER; note = 2'-fluoro uridine
  modified_base 10: mod_base = OTHER; note = 2'O-methyl uridine
  modified_base 11: mod_base = OTHER; note = 2'O-methyl cytidine
  modified_base 12: mod_base = OTHER; note = 2'O-methyl uridine
  modified_base 13: mod_base = OTHER; note = 2'O-methyl guanosine
  modified_base 14: mod_base = OTHER; note = 2'O-methyl guanosine
  modified_base 15: mod_base = OTHER; note = 2'O-methyl uridine
  modified_base 16: mod_base = OTHER; note = 2'O-methyl guanosine
  modified_base 17: mod_base = OTHER; note = 2'O-methyl uridine
  modified_base 18: mod_base = OTHER; note = 2'O-methyl cytidine
  modified_base 19: mod_base = OTHER; note = 2'O-methyl uridine phosphorothioate
  modified_base 20: mod_base = OTHER; note = 2'O-methyl uridine phosphorothioate
  modified_base 21: mod_base = OTHER; note = 2'O-methyl uridine
ggaaaacgttctggtgtcttt

SEQ ID NO: 1382 - RNA, 21 nt, synthetic construct
  source 1..21: mol_type = other RNA
  modified_base 1: mod_base = OTHER; note = 2'O-methyl guanosine phosphorothioate
  modified_base 2: mod_base = OTHER; note = 2'O-methyl uridine phosphorothioate
  modified_base 3: mod_base = OTHER; note = 2'O-methyl cytidine
  modified_base 4: mod_base = OTHER; note = 2'O-methyl uridine
  modified_base 5: mod_base = OTHER; note = 2'-fluoro guanosine
  modified_base 6: mod_base = OTHER; note = 2'O-methyl adenosine
  modified_base 7: mod_base = OTHER; note = 2'-fluoro cytidine
  modified_base 8: mod_base = OTHER; note = 2'-fluoro uridine
  modified_base 9: mod_base = OTHER; note = 2'-fluoro uridine
  modified_base 10: mod_base = OTHER; note = 2'O-methyl uridine
  modified_base 11: mod_base = OTHER; note = 2'O-methyl cytidine
  modified_base 12: mod_base = OTHER; note = 2'O-methyl guanosine
  modified_base 13: mod_base = OTHER; note = 2'O-methyl guanosine
  modified_base 14: mod_base = OTHER; note = 2'O-methyl uridine
  modified_base 15: mod_base = OTHER; note = 2'O-methyl cytidine
  modified_base 16: mod_base = OTHER; note = 2'O-methyl cytidine
  modified_base 17: mod_base = OTHER; note = 2'O-methyl adenosine
  modified_base 18: mod_base = OTHER; note = 2'O-methyl adenosine
  modified_base 19: mod_base = OTHER; note = 2'O-methyl adenosine phosphorothioate
  modified_base 20: mod_base = OTHER; note = 2'O-methyl uridine phosphorothioate
  modified_base 21: mod_base = OTHER; note = 2'O-methyl uridine
gtctgactttcggtccaaatt

SEQ ID NO: 1383 - RNA, 21 nt, synthetic construct
  source 1..21: mol_type = other RNA
  modified_base 1: mod_base = OTHER; note = 2'O-methyl adenosine phosphorothioate
  modified_base 2: mod_base = OTHER; note = 2'O-methyl adenosine phosphorothioate
  modified_base 3: mod_base = OTHER; note = 2'O-methyl adenosine
  modified_base 4: mod_base = OTHER; note = 2'O-methyl cytidine
  modified_base 5: mod_base = OTHER; note = 2'-fluoro guanosine
  modified_base 6: mod_base = OTHER; note = 2'O-methyl uridine
  modified_base 7: mod_base = OTHER; note = 2'-fluoro uridine
  modified_base 8: mod_base = OTHER; note = 2'-fluoro cytidine
  modified_base 9: mod_base = OTHER; note = 2'-fluoro uridine
  modified_base 10: mod_base = OTHER; note = 2'O-methyl guanosine
  modified_base 11: mod_base = OTHER; note = 2'O-methyl guanosine
  modified_base 12: mod_base = OTHER; note = 2'O-methyl uridine
  modified_base 13: mod_base = OTHER; note = 2'O-methyl guanosine
  modified_base 14: mod_base = OTHER; note = 2'O-methyl uridine
  modified_base 15: mod_base = OTHER; note = 2'O-methyl cytidine
  modified_base 16: mod_base = OTHER; note = 2'O-methyl uridine
  modified_base 17: mod_base = OTHER; note = 2'O-methyl guanosine
  modified_base 18: mod_base = OTHER; note = 2'O-methyl adenosine
  modified_base 19: mod_base = OTHER; note = 2'O-methyl cytidine phosphorothioate
  modified_base 20: mod_base = OTHER; note = 2'O-methyl uridine phosphorothioate
  modified_base 21: mod_base = OTHER; note = 2'O-methyl uridine
aaacgttctggtgtctgactt

SEQ ID NO: 1384 - RNA, 21 nt, synthetic construct
  source 1..21: mol_type = other RNA
  modified_base 1: mod_base = OTHER; note = 2'O-methyl guanosine phosphorothioate
  modified_base 2: mod_base = OTHER; note = 2'O-methyl cytidine phosphorothioate
  modified_base 3: mod_base = OTHER; note = 2'O-methyl cytidine
  modified_base 4: mod_base = OTHER; note = 2'O-methyl uridine
  modified_base 5: mod_base = OTHER; note = 2'-fluoro guanosine
  modified_base 6: mod_base = OTHER; note = 2'O-methyl uridine
  modified_base 7: mod_base = OTHER; note = 2'-fluoro guanosine
  modified_base 8: mod_base = OTHER; note = 2'-fluoro guanosine
  modified_base 9: mod_base = OTHER; note = 2'-fluoro adenosine
  modified_base 10: mod_base = OTHER; note = 2'O-methyl adenosine
  modified_base 11: mod_base = OTHER; note = 2'O-methyl uridine
  modified_base 12: mod_base = OTHER; note = 2'O-methyl cytidine
  modified_base 13: mod_base = OTHER; note = 2'O-methyl uridine
  modified_base 14: mod_base = OTHER; note = 2'O-methyl guanosine
  modified_base 15: mod_base = OTHER; note = 2'O-methyl cytidine
  modified_base 16: mod_base = OTHER; note = 2'O-methyl cytidine
  modified_base 17: mod_base = OTHER; note = 2'O-methyl adenosine
  modified_base 18: mod_base = OTHER; note = 2'O-methyl uridine
  modified_base 19: mod_base = OTHER; note = 2'O-methyl uridine phosphorothioate
  modified_base 20: mod_base = OTHER; note = 2'O-methyl uridine phosphorothioate
  modified_base 21: mod_base = OTHER; note = 2'O-methyl uridine
gcctgtggaatctgccatttt

SEQ ID NO: 1385 - RNA, 21 nt, synthetic construct
  source 1..21: mol_type = other RNA
  modified_base 1: mod_base = OTHER; note = 2'O-methyl cytidine phosphorothioate
  modified_base 2: mod_base = OTHER; note = 2'O-methyl cytidine phosphorothioate
  modified_base 3: mod_base = OTHER; note = 2'O-methyl cytidine
  modified_base 4: mod_base = OTHER; note = 2'O-methyl adenosine
  modified_base 5: mod_base = OTHER; note = 2'-fluoro uridine
  modified_base 6: mod_base = OTHER; note = 2'O-methyl uridine
  modified_base 7: mod_base = OTHER; note = 2'-fluoro adenosine
  modified_base 8: mod_base = OTHER; note = 2'-fluoro guanosine
  modified_base 9: mod_base = OTHER; note = 2'-fluoro guanosine
  modified_base 10: mod_base = OTHER; note = 2'O-methyl adenosine
  modified_base 11: mod_base = OTHER; note = 2'O-methyl uridine
  modified_base 12: mod_base = OTHER; note = 2'O-methyl adenosine
  modified_base 13: mod_base = OTHER; note = 2'O-methyl adenosine
  modified_base 14: mod_base = OTHER; note = 2'O-methyl uridine
  modified_base 15: mod_base = OTHER; note = 2'O-methyl guanosine
  modified_base 16: mod_base = OTHER; note = 2'O-methyl uridine
  modified_base 17: mod_base = OTHER; note = 2'O-methyl cytidine
  modified_base 18: mod_base = OTHER; note = 2'O-methyl uridine
  modified_base 19: mod_base = OTHER; note = 2'O-methyl uridine phosphorothioate
  modified_base 20: mod_base = OTHER; note = 2'O-methyl uridine phosphorothioate
  modified_base 21: mod_base = OTHER; note = 2'O-methyl uridine
cccattaggataatgtctttt

SEQ ID NO: 1386 - RNA, 21 nt, synthetic construct
  source 1..21: mol_type = other RNA
  modified_base 1: mod_base = OTHER; note = 2'O-methyl guanosine phosphorothioate
  modified_base 2: mod_base = OTHER; note = 2'O-methyl uridine phosphorothioate
  modified_base 3: mod_base = OTHER; note = 2'O-methyl guanosine
  modified_base 4: mod_base = OTHER; note = 2'O-methyl guanosine
  modified_base 5: mod_base = OTHER; note = 2'-fluoro adenosine
  modified_base 6: mod_base = OTHER; note = 2'O-methyl uridine
  modified_base 7: mod_base = OTHER; note = 2'-fluoro guanosine
  modified_base 8: mod_base = OTHER; note = 2'-fluoro cytidine
  modified_base 9: mod_base = OTHER; note = 2'-fluoro cytidine
  modified_base 10: mod_base = OTHER; note = 2'O-methyl uridine
  modified_base 11: mod_base = OTHER; note = 2'O-methyl uridine
  modified_base 12: mod_base = OTHER; note = 2'O-methyl guanosine
  modified_base 13: mod_base = OTHER; note = 2'O-methyl guanosine
  modified_base 14: mod_base = OTHER; note = 2'O-methyl uridine
  modified_base 15: mod_base = OTHER; note = 2'O-methyl adenosine
  modified_base 16: mod_base = OTHER; note = 2'O-methyl uridine
  modified_base 17: mod_base = OTHER; note = 2'O-methyl guanosine
  modified_base 18: mod_base = OTHER; note = 2'O-methyl uridine
  modified_base 19: mod_base = OTHER; note = 2'O-methyl uridine phosphorothioate
  modified_base 20: mod_base = OTHER; note = 2'O-methyl uridine phosphorothioate
  modified_base 21: mod_base = OTHER; note = 2'O-methyl uridine
gtggatgccttggtatgtttt

SEQ ID NO: 1387 - RNA, 21 nt, synthetic construct
  source 1..21: mol_type = other RNA
  modified_base 1: mod_base = OTHER; note = 2'O-methyl cytidine phosphorothioate
  modified_base 2: mod_base = OTHER; note = 2'O-methyl adenosine phosphorothioate
  modified_base 3: mod_base = OTHER; note = 2'O-methyl adenosine
  modified_base 4: mod_base = OTHER; note = 2'O-methyl adenosine
  modified_base 5: mod_base = OTHER; note = 2'-fluoro guanosine
  modified_base 6: mod_base = OTHER; note = 2'O-methyl adenosine
  modified_base 7: mod_base = OTHER; note = 2'-fluoro cytidine
  modified_base 8: mod_base = OTHER; note = 2'-fluoro guanosine
  modified_base 9: mod_base = OTHER; note = 2'-fluoro adenosine
  modified_base 10: mod_base = OTHER; note = 2'O-methyl adenosine
  modified_base 11: mod_base = OTHER; note = 2'O-methyl guanosine
  modified_base 12: mod_base = OTHER; note = 2'O-methyl uridine
  modified_base 13: mod_base = OTHER; note = 2'O-methyl cytidine
  modified_base 14: mod_base = OTHER; note = 2'O-methyl guanosine
  modified_base 15: mod_base = OTHER; note = 2'O-methyl uridine
  modified_base 16: mod_base = OTHER; note = 2'O-methyl guanosine
  modified_base 17: mod_base = OTHER; note = 2'O-methyl guanosine
  modified_base 18: mod_base = OTHER; note = 2'O-methyl adenosine
  modified_base 19: mod_base = OTHER; note = 2'O-methyl uridine phosphorothioate
  modified_base 20: mod_base = OTHER; note = 2'O-methyl uridine phosphorothioate
  modified_base 21: mod_base = OTHER; note = 2'O-methyl uridine
caaagacgaagtcgtggattt

SEQ ID NO: 1388 - RNA, 21 nt, synthetic construct
  source 1..21: mol_type = other RNA
  modified_base 1: mod_base = OTHER; note = 2'O-methyl uridine phosphorothioate
  modified_base 2: mod_base = OTHER; note = 2'O-methyl guanosine phosphorothioate
  modified_base 3: mod_base = OTHER; note = 2'O-methyl guanosine
  modified_base 4: mod_base = OTHER; note = 2'O-methyl adenosine
  modified_base 5: mod_base = OTHER; note = 2'-fluoro uridine
  modified_base 6: mod_base = OTHER; note = 2'O-methyl guanosine
  modified_base 7: mod_base = OTHER; note = 2'-fluoro cytidine
  modified_base 8: mod_base = OTHER; note = 2'-fluoro cytidine
  modified_base 9: mod_base = OTHER; note = 2'-fluoro uridine
  modified_base 10: mod_base = OTHER; note = 2'O-methyl uridine
  modified_base 11: mod_base = OTHER; note = 2'O-methyl guanosine
  modified_base 12: mod_base = OTHER; note = 2'O-methyl guanosine
  modified_base 13: mod_base = OTHER; note = 2'O-methyl uridine
  modified_base 14: mod_base = OTHER; note = 2'O-methyl adenosine
  modified_base 15: mod_base = OTHER; note = 2'O-methyl uridine
  modified_base 16: mod_base = OTHER; note = 2'O-methyl guanosine
  modified_base 17: mod_base = OTHER; note = 2'O-methyl uridine
  modified_base 18: mod_base = OTHER; note = 2'O-methyl uridine
  modified_base 19: mod_base = OTHER; note = 2'O-methyl cytidine phosphorothioate
  modified_base 20: mod_base = OTHER; note = 2'O-methyl uridine phosphorothioate
  modified_base 21: mod_base = OTHER; note = 2'O-methyl uridine
tggatgccttggtatgttctt

SEQ ID NO: 1389 - RNA, 21 nt, synthetic construct
  source 1..21: mol_type = other RNA
  modified_base 1: mod_base = OTHER; note = 2'-fluoro uridine phosphorothioate
  modified_base 2: mod_base = OTHER; note = 2'O-methyl cytidine phosphorothioate
  modified_base 3: mod_base = OTHER; note = 2'-fluoro cytidine
  modified_base 4: mod_base = OTHER; note = 2'O-methyl uridine
  modified_base 5: mod_base = OTHER; note = 2'-fluoro cytidine
  modified_base 6: mod_base = OTHER; note = 2'O-methyl cytidine
  modified_base 7: mod_base = OTHER; note = 2'-fluoro guanosine
  modified_base 8: mod_base = OTHER; note = 2'O-methyl cytidine
  modified_base 9: mod_base = OTHER; note = 2'-fluoro guanosine
  modified_base 10: mod_base = OTHER; note = 2'O-methyl adenosine
  modified_base 11: mod_base = OTHER; note = 2'-fluoro cytidine
  modified_base 12: mod_base = OTHER; note = 2'O-methyl guanosine
  modified_base 13: mod_base = OTHER; note = 2'-fluoro cytidine
  modified_base 14: mod_base = OTHER; note = 2'O-methyl guanosine
  modified_base 15: mod_base = OTHER; note = 2'-fluoro cytidine
  modified_base 16: mod_base = OTHER; note = 2'O-methyl guanosine
  modified_base 17: mod_base = OTHER; note = 2'-fluoro cytidine
  modified_base 18: mod_base = OTHER; note = 2'O-methyl adenosine
  modified_base 19: mod_base = OTHER; note = 2'-fluoro uridine
  modified_base 20: mod_base = OTHER; note = 2'O-methyl guanosine phosphorothioate
  modified_base 21: mod_base = OTHER; note = 2'-fluoro uridine
tcctccgcgacgcgcgcatgt

SEQ ID NO: 1390 - RNA, 21 nt, synthetic construct
  source 1..21: mol_type = other RNA
  modified_base 1: mod_base = OTHER; note = 2'-fluoro cytidine phosphorothioate
  modified_base 2: mod_base = OTHER; note = 2'O-methyl cytidine phosphorothioate
  modified_base 3: mod_base = OTHER; note = 2'-fluoro uridine
  modified_base 4: mod_base = OTHER; note = 2'O-methyl cytidine
  modified_base 5: mod_base = OTHER; note = 2'-fluoro cytidine
  modified_base 6: mod_base = OTHER; note = 2'O-methyl guanosine
  modified_base 7: mod_base = OTHER; note = 2'-fluoro cytidine
  modified_base 8: mod_base = OTHER; note = 2'O-methyl guanosine
  modified_base 9: mod_base = OTHER; note = 2'-fluoro adenosine
  modified_base 10: mod_base = OTHER; note = 2'O-methyl cytidine
  modified_base 11: mod_base = OTHER; note = 2'-fluoro guanosine
  modified_base 12: mod_base = OTHER; note = 2'O-methyl cytidine
  modified_base 13: mod_base = OTHER; note = 2'-fluoro guanosine
  modified_base 14: mod_base = OTHER; note = 2'O-methyl cytidine
  modified_base 15: mod_base = OTHER; note = 2'-fluoro guanosine
  modified_base 16: mod_base = OTHER; note = 2'O-methyl cytidine
  modified_base 17: mod_base = OTHER; note = 2'-fluoro adenosine
  modified_base 18: mod_base = OTHER; note = 2'O-methyl uridine
  modified_base 19: mod_base = OTHER; note = 2'-fluoro guanosine
  modified_base 20: mod_base = OTHER; note = 2'O-methyl uridine phosphorothioate
  modified_base 21: mod_base = OTHER; note = 2'-fluoro uridine
cctccgcgacgcgcgcatgtt

SEQ ID NO: 1391 - RNA, 21 nt, synthetic construct
  source 1..21: mol_type = other RNA
  modified_base 1: mod_base = OTHER; note = 2'-fluoro cytidine phosphorothioate
  modified_base 2: mod_base = OTHER; note = 2'O-methyl uridine phosphorothioate
  modified_base 3: mod_base = OTHER; note = 2'-fluoro cytidine
  modified_base 4: mod_base = OTHER; note = 2'O-methyl cytidine
  modified_base 5: mod_base = OTHER; note = 2'-fluoro guanosine
  modified_base 6: mod_base = OTHER; note = 2'O-methyl cytidine
  modified_base 7: mod_base = OTHER; note = 2'-fluoro guanosine
  modified_base 8: mod_base = OTHER; note = 2'O-methyl adenosine
  modified_base 9: mod_base = OTHER; note = 2'-fluoro cytidine
  modified_base 10: mod_base = OTHER; note = 2'O-methyl guanosine
  modified_base 11: mod_base = OTHER; note = 2'-fluoro cytidine
  modified_base 12: mod_base = OTHER; note = 2'O-methyl guanosine
  modified_base 13: mod_base = OTHER; note = 2'-fluoro cytidine
  modified_base 14: mod_base = OTHER; note = 2'O-methyl guanosine
  modified_base 15: mod_base = OTHER; note = 2'-fluoro cytidine
  modified_base 16: mod_base = OTHER; note = 2'O-methyl adenosine
  modified_base 17: mod_base = OTHER; note = 2'-fluoro uridine
  modified_base 18: mod_base = OTHER; note = 2'O-methyl guanosine
  modified_base 19: mod_base = OTHER; note = 2'-fluoro uridine
  modified_base 20: mod_base = OTHER; note = 2'O-methyl uridine phosphorothioate
  modified_base 21: mod_base = OTHER; note = 2'-fluoro guanosine
ctccgcgacgcgcgcatgttg

SEQ ID NO: 1392 - RNA, 21 nt, synthetic construct
  source 1..21: mol_type = other RNA
  modified_base 1: mod_base = OTHER; note = 2'-fluoro uridine phosphorothioate
  modified_base 2: mod_base = OTHER; note = 2'O-methyl cytidine phosphorothioate
  modified_base 3: mod_base = OTHER; note = 2'-fluoro cytidine
  modified_base 4: mod_base = OTHER; note = 2'O-methyl guanosine
  modified_base 5: mod_base = OTHER; note = 2'-fluoro cytidine
  modified_base 6: mod_base = OTHER; note = 2'O-methyl guanosine
  modified_base 7: mod_base = OTHER; note = 2'-fluoro adenosine
  modified_base 8: mod_base = OTHER; note = 2'O-methyl cytidine
  modified_base 9: mod_base = OTHER; note = 2'-fluoro guanosine
  modified_base 10: mod_base = OTHER; note = 2'O-methyl cytidine
  modified_base 11: mod_base = OTHER; note = 2'-fluoro guanosine
  modified_base 12: mod_base = OTHER; note = 2'O-methyl cytidine
  modified_base 13: mod_base = OTHER; note = 2'-fluoro guanosine
  modified_base 14: mod_base = OTHER; note = 2'O-methyl cytidine
  modified_base 15: mod_base = OTHER; note = 2'-fluoro adenosine
  modified_base 16: mod_base = OTHER; note = 2'O-methyl uridine
  modified_base 17: mod_base = OTHER; note = 2'-fluoro guanosine
  modified_base 18: mod_base = OTHER; note = 2'O-methyl uridine
  modified_base 19: mod_base = OTHER; note = 2'-fluoro uridine
  modified_base 20: mod_base = OTHER; note = 2'O-methyl guanosine phosphorothioate
  modified_base 21: mod_base = OTHER; note = 2'-fluoro uridine
tccgcgacgcgcgcatgttgt

SEQ ID NO: 1393 - RNA, 21 nt, synthetic construct
  source 1..21: mol_type = other RNA
  modified_base 1: mod_base = OTHER; note = 2'-fluoro cytidine phosphorothioate
  modified_base 2: mod_base = OTHER; note = 2'O-methyl cytidine phosphorothioate
  modified_base 3: mod_base = OTHER; note = 2'-fluoro guanosine
  modified_base 4: mod_base = OTHER; note = 2'O-methyl cytidine
  modified_base 5: mod_base = OTHER; note = 2'-fluoro guanosine
  modified_base 6: mod_base = OTHER; note = 2'O-methyl adenosine
  modified_base 7: mod_base = OTHER; note = 2'-fluoro cytidine
  modified_base 8: mod_base = OTHER; note = 2'O-methyl guanosine
  modified_base 9: mod_base = OTHER; note = 2'-fluoro cytidine
  modified_base 10: mod_base = OTHER; note = 2'O-methyl guanosine
  modified_base 11: mod_base = OTHER; note = 2'-fluoro cytidine
  modified_base 12: mod_base = OTHER; note = 2'O-methyl guanosine
  modified_base 13: mod_base = OTHER; note = 2'-fluoro cytidine
  modified_base 14: mod_base = OTHER; note = 2'O-methyl adenosine
  modified_base 15: mod_base = OTHER; note = 2'-fluoro uridine
  modified_base 16: mod_base = OTHER; note = 2'O-methyl guanosine
  modified_base 17: mod_base = OTHER; note = 2'-fluoro uridine
  modified_base 18: mod_base = OTHER; note = 2'O-methyl uridine
  modified_base 19: mod_base = OTHER; note = 2'-fluoro guanosine
  modified_base 20: mod_base = OTHER; note = 2'O-methyl uridine phosphorothioate
  modified_base 21: mod_base = OTHER; note = 2'-fluoro uridine
ccgcgacgcgcgcatgttgtt

SEQ ID NO: 1394 - RNA, 21 nt, synthetic construct
  source 1..21: mol_type = other RNA
  modified_base 1: mod_base = OTHER; note = 2'-fluoro guanosine phosphorothioate
  modified_base 2: mod_base = OTHER; note = 2'O-methyl cytidine phosphorothioate
  modified_base 3: mod_base = OTHER; note = 2'-fluoro guanosine
  modified_base 4: mod_base = OTHER; note = 2'O-methyl adenosine
  modified_base 5: mod_base = OTHER; note = 2'-fluoro cytidine
  modified_base 6: mod_base = OTHER; note = 2'O-methyl guanosine
  modified_base 7: mod_base = OTHER; note = 2'-fluoro cytidine
  modified_base 8: mod_base = OTHER; note = 2'O-methyl guanosine
  modified_base 9: mod_base = OTHER; note = 2'-fluoro cytidine
  modified_base 10: mod_base = OTHER; note = 2'O-methyl guanosine
  modified_base 11: mod_base = OTHER; note = 2'-fluoro cytidine
  modified_base 12: mod_base = OTHER; note = 2'O-methyl adenosine
  modified_base 13: mod_base = OTHER; note = 2'-fluoro uridine
  modified_base 14: mod_base = OTHER; note = 2'O-methyl guanosine
  modified_base 15: mod_base = OTHER; note = 2'-fluoro uridine
  modified_base 16: mod_base = OTHER; note = 2'O-methyl uridine
  modified_base 17: mod_base = OTHER; note = 2'-fluoro guanosine
  modified_base 18: mod_base = OTHER; note = 2'O-methyl uridine
  modified_base 19: mod_base = OTHER; note = 2'-fluoro uridine
  modified_base 20: mod_base = OTHER; note = 2'O-methyl cytidine phosphorothioate
  modified_base 21: mod_base = OTHER; note = 2'-fluoro guanosine
gcgacgcgcgcatgttgttcg

SEQ ID NO: 1395 - RNA, 21 nt, synthetic construct
  source 1..21: mol_type = other RNA
  modified_base 1: mod_base = OTHER; note = 2'-fluoro cytidine phosphorothioate
  modified_base 2: mod_base = OTHER; note = 2'O-methyl guanosine phosphorothioate
  modified_base 3: mod_base = OTHER; note = 2'-fluoro adenosine
  modified_base 4: mod_base = OTHER; note = 2'O-methyl cytidine
  modified_base 5: mod_base = OTHER; note = 2'-fluoro guanosine
  modified_base 6: mod_base = OTHER; note = 2'O-methyl cytidine
  modified_base 7: mod_base = OTHER; note = 2'-fluoro guanosine
  modified_base 8: mod_base = OTHER; note = 2'O-methyl cytidine
  modified_base 9: mod_base = OTHER; note = 2'-fluoro guanosine
  modified_base 10: mod_base = OTHER; note = 2'O-methyl cytidine
  modified_base 11: mod_base = OTHER; note = 2'-fluoro adenosine
  modified_base 12: mod_base = OTHER; note = 2'O-methyl uridine
  modified_base 13: mod_base = OTHER; note = 2'-fluoro guanosine
  modified_base 14: mod_base = OTHER; note = 2'O-methyl uridine
  modified_base 15: mod_base = OTHER; note = 2'-fluoro uridine
  modified_base 16: mod_base = OTHER; note = 2'O-methyl guanosine
  modified_base 17: mod_base = OTHER; note = 2'-fluoro uridine
  modified_base 18: mod_base = OTHER; note = 2'O-methyl uridine
  modified_base 19: mod_base = OTHER; note = 2'-fluoro cytidine
  modified_base 20: mod_base = OTHER; note = 2'O-methyl guanosine phosphorothioate
  modified_base 21: mod_base = OTHER; note = 2'-fluoro guanosine
cgacgcgcgcatgttgttcgg

SEQ ID NO: 1396 - RNA, 21 nt, synthetic construct
  source 1..21: mol_type = other RNA
  modified_base 1: mod_base = OTHER; note = 2'-fluoro guanosine phosphorothioate
  modified_base 2: mod_base = OTHER; note = 2'O-methyl adenosine phosphorothioate
  modified_base 3: mod_base = OTHER; note = 2'-fluoro cytidine
  modified_base 4: mod_base = OTHER; note = 2'O-methyl guanosine
  modified_base 5: mod_base = OTHER; note = 2'-fluoro cytidine
  modified_base 6: mod_base = OTHER; note = 2'O-methyl guanosine
  modified_base 7: mod_base = OTHER; note = 2'-fluoro cytidine
  modified_base 8: mod_base = OTHER; note = 2'O-methyl guanosine
  modified_base 9: mod_base = OTHER; note = 2'-fluoro cytidine
  modified_base 10: mod_base = OTHER; note = 2'O-methyl adenosine
  modified_base 11: mod_base = OTHER; note = 2'-fluoro uridine
  modified_base 12: mod_base = OTHER; note = 2'O-methyl guanosine
  modified_base 13: mod_base = OTHER; note = 2'-fluoro uridine
  modified_base 14: mod_base = OTHER; note = 2'O-methyl uridine
  modified_base 15: mod_base = OTHER; note = 2'-fluoro guanosine
  modified_base 16: mod_base = OTHER; note = 2'O-methyl uridine
  modified_base 17: mod_base = OTHER; note = 2'-fluoro uridine
  modified_base 18: mod_base = OTHER; note = 2'O-methyl cytidine
  modified_base 19: mod_base = OTHER; note = 2'-fluoro guanosine
  modified_base 20: mod_base = OTHER; note = 2'O-methyl guanosine phosphorothioate
  modified_base 21: mod_base = OTHER; note = 2'-fluoro cytidine
gacgcgcgcatgttgttcggc

SEQ ID NO: 1397 - RNA, 21 nt, synthetic construct
  source 1..21: mol_type = other RNA
  modified_base 1: mod_base = OTHER; note = 2'-fluoro uridine phosphorothioate
  modified_base 2: mod_base = OTHER; note = 2'O-methyl cytidine phosphorothioate
  modified_base 3: mod_base = OTHER; note = 2'-fluoro uridine
  modified_base 4: mod_base = OTHER; note = 2'O-methyl uridine
  modified_base 5: mod_base = OTHER; note = 2'-fluoro guanosine
  modified_base 6: mod_base = OTHER; note = 2'O-methyl uridine
  modified_base 7: mod_base = OTHER; note = 2'-fluoro guanosine
  modified_base 8: mod_base = OTHER; note = 2'O-methyl cytidine
  modified_base 9: mod_base = OTHER; note = 2'-fluoro guanosine
  modified_base 10: mod_base = OTHER; note = 2'O-methyl guanosine
  modified_base 11: mod_base = OTHER; note = 2'-fluoro adenosine
  modified_base 12: mod_base = OTHER; note = 2'O-methyl adenosine
  modified_base 13: mod_base = OTHER; note = 2'-fluoro guanosine
  modified_base 14: mod_base = OTHER; note = 2'O-methyl guanosine
  modified_base 15: mod_base = OTHER; note = 2'-fluoro cytidine
  modified_base 16: mod_base = OTHER; note = 2'O-methyl cytidine
  modified_base 17: mod_base = OTHER; note = 2'-fluoro adenosine
  modified_base 18: mod_base = OTHER; note = 2'O-methyl guanosine
  modified_base 19: mod_base = OTHER; note = 2'-fluoro guanosine
  modified_base 20: mod_base = OTHER; note = 2'O-methyl adenosine phosphorothioate
  modified_base 21: mod_base = OTHER; note = 2'-fluoro guanosine
tcttgtgcggaaggccaggag

SEQ ID NO: 1398 - RNA, 21 nt, synthetic construct
  source 1..21: mol_type = other RNA
  modified_base 1: mod_base = OTHER; note = 2'-fluoro cytidine phosphorothioate
  modified_base 2: mod_base = OTHER; note = 2'O-methyl uridine phosphorothioate
  modified_base 3: mod_base = OTHER; note = 2'-fluoro uridine
  modified_base 4: mod_base = OTHER; note = 2'O-methyl guanosine
  modified_base 5: mod_base = OTHER; note = 2'-fluoro uridine
  modified_base 6: mod_base = OTHER; note = 2'O-methyl guanosine
  modified_base 7: mod_base = OTHER; note = 2'-fluoro cytidine
  modified_base 8: mod_base = OTHER; note = 2'O-methyl guanosine
  modified_base 9: mod_base = OTHER; note = 2'-fluoro guanosine
  modified_base 10: mod_base = OTHER; note = 2'O-methyl adenosine
  modified_base 11: mod_base = OTHER; note = 2'-fluoro adenosine
  modified_base 12: mod_base = OTHER; note = 2'O-methyl guanosine
  modified_base 13: mod_base = OTHER; note = 2'-fluoro guanosine
  modified_base 14: mod_base = OTHER; note = 2'O-methyl cytidine
  modified_base 15: mod_base = OTHER; note = 2'-fluoro cytidine
  modified_base 16: mod_base = OTHER; note = 2'O-methyl adenosine
  modified_base 17: mod_base = OTHER; note = 2'-fluoro guanosine
  modified_base 18: mod_base = OTHER; note = 2'O-methyl guanosine
  modified_base 19: mod_base = OTHER; note = 2'-fluoro adenosine
  modified_base 20: mod_base = OTHER; note = 2'O-methyl guanosine phosphorothioate
  modified_base 21: mod_base = OTHER; note = 2'-fluoro uridine
cttgtgcggaaggccaggagt

SEQ ID NO: 1399 - RNA, 21 nt, synthetic construct
  source 1..21: mol_type = other RNA
  modified_base 1: mod_base = OTHER; note = 2'-fluoro uridine phosphorothioate
  modified_base 2: mod_base = OTHER; note = 2'O-methyl guanosine phosphorothioate
  modified_base 3: mod_base = OTHER; note = 2'-fluoro uridine
  modified_base 4: mod_base = OTHER; note = 2'O-methyl guanosine
  modified_base 5: mod_base = OTHER; note = 2'-fluoro cytidine
  modified_base 6: mod_base = OTHER; note = 2'O-methyl guanosine
  modified_base 7: mod_base = OTHER; note = 2'-fluoro guanosine
  modified_base 8: mod_base = OTHER; note = 2'O-methyl adenosine
  modified_base 9: mod_base = OTHER; note = 2'-fluoro adenosine
  modified_base 10: mod_base = OTHER; note = 2'O-methyl guanosine
  modified_base 11: mod_base = OTHER; note = 2'-fluoro guanosine
  modified_base 12: mod_base = OTHER; note = 2'O-methyl cytidine
  modified_base 13: mod_base = OTHER; note = 2'-fluoro cytidine
  modified_base 14: mod_base = OTHER; note = 2'O-methyl adenosine
  modified_base 15: mod_base = OTHER; note = 2'-fluoro guanosine
  modified_base 16: mod_base = OTHER; note = 2'O-methyl guanosine
  modified_base 17: mod_base = OTHER; note = 2'-fluoro adenosine
  modified_base 18: mod_base = OTHER; note = 2'O-methyl guanosine
  modified_base 19: mod_base = OTHER; note = 2'-fluoro uridine
  modified_base 20: mod_base = OTHER; note = 2'O-methyl cytidine phosphorothioate
  modified_base 21: mod_base = OTHER; note = 2'-fluoro guanosine
tgtgcggaaggccaggagtcg

SEQ ID NO: 1400 - RNA, 21 nt, synthetic construct
  source 1..21: mol_type = other RNA
  modified_base 1: mod_base = OTHER; note = 2'-fluoro uridine phosphorothioate
  modified_base 2: mod_base = OTHER; note = 2'O-methyl guanosine phosphorothioate
  modified_base 3: mod_base = OTHER; note = 2'-fluoro cytidine
  modified_base 4: mod_base = OTHER; note = 2'O-methyl guanosine
  modified_base 5: mod_base = OTHER; note = 2'-fluoro guanosine
  modified_base 6: mod_base = OTHER; note = 2'O-methyl adenosine
  modified_base 7: mod_base = OTHER; note = 2'-fluoro adenosine
  modified_base 8: mod_base = OTHER; note = 2'O-methyl guanosine
  modified_base 9: mod_base = OTHER; note = 2'-fluoro guanosine
  modified_base 10: mod_base = OTHER; note = 2'O-methyl cytidine
  modified_base 11: mod_base = OTHER; note = 2'-fluoro cytidine
  modified_base 12: mod_base = OTHER; note = 2'O-methyl adenosine
  modified_base 13: mod_base = OTHER; note = 2'-fluoro guanosine
  modified_base 14: mod_base = OTHER; note = 2'O-methyl guanosine
  modified_base 15: mod_base = OTHER; note = 2'-fluoro adenosine
  modified_base 16: mod_base = OTHER; note = 2'O-methyl guanosine
  modified_base 17: mod_base = OTHER; note = 2'-fluoro uridine
  modified_base 18: mod_base = OTHER; note = 2'O-methyl cytidine
  modified_base 19: mod_base = OTHER; note = 2'-fluoro guanosine
  modified_base 20: mod_base = OTHER; note = 2'O-methyl guanosine phosphorothioate
  modified_base 21: mod_base = OTHER; note = 2'-fluoro adenosine
tgcggaaggccaggagtcgga

SEQ ID NO: 1401 - RNA, 21 nt, synthetic construct
  source 1..21: mol_type = other RNA
  modified_base 1: mod_base = OTHER; note = 2'-fluoro cytidine phosphorothioate
  modified_base 2: mod_base = OTHER; note = 2'O-methyl guanosine phosphorothioate
  modified_base 3: mod_base = OTHER; note = 2'-fluoro guanosine
  modified_base 4: mod_base = OTHER; note = 2'O-methyl adenosine
  modified_base 5: mod_base = OTHER; note = 2'-fluoro adenosine
  modified_base 6: mod_base = OTHER; note = 2'O-methyl guanosine
  modified_base 7: mod_base = OTHER; note = 2'-fluoro guanosine
  modified_base 8: mod_base = OTHER; note = 2'O-methyl cytidine
  modified_base 9: mod_base = OTHER; note = 2'-fluoro cytidine
  modified_base 10: mod_base = OTHER; note = 2'O-methyl adenosine
  modified_base 11: mod_base = OTHER; note = 2'-fluoro guanosine
  modified_base 12: mod_base = OTHER; note = 2'O-methyl guanosine
  modified_base 13: mod_base = OTHER; note = 2'-fluoro adenosine
  modified_base 14: mod_base = OTHER; note = 2'O-methyl guanosine
  modified_base 15: mod_base = OTHER; note = 2'-fluoro uridine
  modified_base 16: mod_base = OTHER; note = 2'O-methyl cytidine
  modified_base 17: mod_base = OTHER; note = 2'-fluoro guanosine
  modified_base 18: mod_base = OTHER; note = 2'O-methyl guanosine
  modified_base 19: mod_base = OTHER; note = 2'-fluoro adenosine
  modified_base 20: mod_base = OTHER; note = 2'O-methyl adenosine phosphorothioate
  modified_base 21: mod_base = OTHER; note = 2'-fluoro cytidine
cggaaggccaggagtcggaac

SEQ ID NO: 1402 - RNA, 21 nt, synthetic construct
  source 1..21: mol_type = other RNA
  modified_base 1: mod_base = OTHER; note = 2'-fluoro adenosine phosphorothioate
  modified_base 2: mod_base = OTHER; note = 2'O-methyl adenosine phosphorothioate
  modified_base 3: mod_base = OTHER; note = 2'-fluoro guanosine
  modified_base 4: mod_base = OTHER; note = 2'O-methyl guanosine
  modified_base 5: mod_base = OTHER; note = 2'-fluoro cytidine
  modified_base 6: mod_base = OTHER; note = 2'O-methyl cytidine
  modified_base 7: mod_base = OTHER; note = 2'-fluoro adenosine
  modified_base 8: mod_base = OTHER; note = 2'O-methyl guanosine
  modified_base 9: mod_base = OTHER; note = 2'-fluoro guanosine
  modified_base 10: mod_base = OTHER; note = 2'O-methyl adenosine
  modified_base 11: mod_base = OTHER; note = 2'-fluoro guanosine
  modified_base 12: mod_base = OTHER; note = 2'O-methyl uridine
  modified_base 13: mod_base = OTHER; note = 2'-fluoro cytidine
  modified_base 14: mod_base = OTHER; note = 2'O-methyl guanosine
  modified_base 15: mod_base = OTHER; note = 2'-fluoro guanosine
  modified_base 16: mod_base = OTHER; note = 2'O-methyl adenosine
  modified_base 17: mod_base = OTHER; note = 2'-fluoro adenosine
  modified_base 18: mod_base = OTHER; note = 2'O-methyl cytidine
  modified_base 19: mod_base = OTHER; note = 2'-fluoro adenosine
  modified_base 20: mod_base = OTHER; note = 2'O-methyl uridine phosphorothioate
  modified_base 21: mod_base = OTHER; note = 2'-fluoro uridine
aaggccaggagtcggaacatt

SEQ ID NO: 1403 - RNA, 21 nt, synthetic construct
  source 1..21: mol_type = other RNA
  modified_base 1: mod_base = OTHER; note = 2'-fluoro adenosine phosphorothioate
  modified_base 2: mod_base = OTHER; note = 2'O-methyl guanosine phosphorothioate
  modified_base 3: mod_base = OTHER; note = 2'-fluoro guanosine
  modified_base 4: mod_base = OTHER; note = 2'O-methyl cytidine
  modified_base 5: mod_base = OTHER; note = 2'-fluoro cytidine
  modified_base 6: mod_base = OTHER; note = 2'O-methyl adenosine
  modified_base 7: mod_base = OTHER; note = 2'-fluoro guanosine
  modified_base 8: mod_base = OTHER; note = 2'O-methyl guanosine
  modified_base 9: mod_base = OTHER; note = 2'-fluoro adenosine
  modified_base 10: mod_base = OTHER; note = 2'O-methyl guanosine
  modified_base 11: mod_base = OTHER; note = 2'-fluoro uridine
  modified_base 12: mod_base = OTHER; note = 2'O-methyl cytidine
  modified_base 13: mod_base = OTHER; note = 2'-fluoro guanosine
  modified_base 14: mod_base = OTHER; note = 2'O-methyl guanosine
  modified_base 15: mod_base = OTHER; note = 2'-fluoro adenosine
  modified_base 16: mod_base = OTHER; note = 2'O-methyl adenosine
  modified_base 17: mod_base = OTHER; note = 2'-fluoro cytidine
  modified_base 18: mod_base = OTHER; note = 2'O-methyl adenosine
  modified_base 19: mod_base = OTHER; note = 2'-fluoro uridine
  modified_base 20: mod_base = OTHER; note = 2'O-methyl uridine phosphorothioate
  modified_base 21: mod_base = OTHER; note = 2'-fluoro guanosine
aggccaggagtcggaacattg

SEQ ID NO: 1404 - RNA, 21 nt, synthetic construct
  source 1..21: mol_type = other RNA
  modified_base 1: mod_base = OTHER; note = 2'-fluoro guanosine phosphorothioate
  modified_base 2: mod_base = OTHER; note = 2'O-methyl guanosine phosphorothioate
  modified_base 3: mod_base = OTHER; note = 2'-fluoro cytidine
  modified_base 4: mod_base = OTHER; note = 2'O-methyl cytidine
  modified_base 5: mod_base = OTHER; note = 2'-fluoro adenosine
  modified_base 6: mod_base = OTHER; note = 2'O-methyl guanosine
  modified_base 7: mod_base = OTHER; note = 2'-fluoro guanosine
  modified_base 8: mod_base = OTHER; note = 2'O-methyl adenosine
  modified_base 9: mod_base = OTHER; note = 2'-fluoro guanosine
  modified_base 10: mod_base = OTHER; note = 2'O-methyl uridine
  modified_base 11: mod_base = OTHER; note = 2'-fluoro cytidine
  modified_base 12: mod_base = OTHER; note = 2'O-methyl guanosine
  modified_base 13: mod_base = OTHER; note = 2'-fluoro guanosine
  modified_base 14: mod_base = OTHER; note = 2'O-methyl adenosine
  modified_base 15: mod_base = OTHER; note = 2'-fluoro adenosine
  modified_base 16: mod_base = OTHER; note = 2'O-methyl cytidine
  modified_base 17: mod_base = OTHER; note = 2'-fluoro adenosine
  modified_base 18: mod_base = OTHER; note = 2'O-methyl uridine
  modified_base 19: mod_base = OTHER; note = 2'-fluoro uridine
  modified_base 20: mod_base = OTHER; note = 2'O-methyl guanosine phosphorothioate
  modified_base 21: mod_base = OTHER; note = 2'-fluoro guanosine
ggccaggagtcggaacattgg

SEQ ID NO: 1405 - RNA, 21 nt, synthetic construct
  source 1..21: mol_type = other RNA
  modified_base 1: mod_base = OTHER; note = 2'-fluoro adenosine phosphorothioate
  modified_base 2: mod_base = OTHER; note = 2'O-methyl guanosine phosphorothioate
  modified_base 3: mod_base = OTHER; note = 2'-fluoro guanosine
  modified_base 4: mod_base = OTHER; note = 2'O-methyl adenosine
  modified_base 5: mod_base = OTHER; note = 2'-fluoro guanosine
  modified_base 6: mod_base = OTHER; note = 2'O-methyl uridine
  modified_base 7: mod_base = OTHER; note = 2'-fluoro cytidine
  modified_base 8: mod_base = OTHER; note = 2'O-methyl guanosine
  modified_base 9: mod_base = OTHER; note = 2'-fluoro guanosine
  modified_base 10: mod_base = OTHER; note = 2'O-methyl adenosine
  modified_base 11: mod_base = OTHER; note = 2'-fluoro adenosine
  modified_base 12: mod_base = OTHER; note = 2'O-methyl cytidine
  modified_base 13: mod_base = OTHER; note = 2'-fluoro adenosine
  modified_base 14: mod_base = OTHER; note = 2'O-methyl uridine
  modified_base 15: mod_base = OTHER; note = 2'-fluoro uridine
  modified_base 16: mod_base = OTHER; note = 2'O-methyl guanosine
  modified_base 17: mod_base = OTHER; note = 2'-fluoro guanosine
  modified_base 18: mod_base = OTHER; note = 2'O-methyl cytidine
  modified_base 19: mod_base = OTHER; note = 2'-fluoro adenosine
  modified_base 20: mod_base = OTHER; note = 2'O-methyl uridine phosphorothioate
  modified_base 21: mod_base = OTHER; note = 2'-fluoro cytidine
aggagtcggaacattggcatc

SEQ ID NO: 1406 - RNA, 21 nt, synthetic construct
  source 1..21: mol_type = other RNA
  modified_base 1: mod_base = OTHER; note = 2'-fluoro cytidine phosphorothioate
  modified_base 2: mod_base = OTHER; note = 2'O-methyl cytidine phosphorothioate
  modified_base 3: mod_base = OTHER; note = 2'-fluoro adenosine
  modified_base 4: mod_base = OTHER; note = 2'O-methyl adenosine
  modified_base 5: mod_base = OTHER; note = 2'-fluoro uridine
  modified_base 6: mod_base = OTHER; note = 2'O-methyl guanosine
  modified_base 7: mod_base = OTHER; note = 2'-fluoro uridine
  modified_base 8: mod_base = OTHER; note = 2'O-methyl cytidine
  modified_base 9: mod_base = OTHER; note = 2'-fluoro cytidine
  modified_base 10: mod_base = OTHER; note = 2'O-methyl adenosine
  modified_base 11: mod_base = OTHER; note = 2'-fluoro cytidine
  modified_base 12: mod_base = OTHER; note = 2'O-methyl cytidine
  modified_base 13: mod_base = OTHER; note = 2'-fluoro adenosine
  modified_base 14: mod_base = OTHER; note = 2'O-methyl guanosine
  modified_base 15: mod_base = OTHER; note = 2'-fluoro cytidine
  modified_base 16: mod_base = OTHER; note = 2'O-methyl uridine
  modified_base 17: mod_base = OTHER; note = 2'-fluoro cytidine
  modified_base 18: mod_base = OTHER; note = 2'O-methyl adenosine
  modified_base 19: mod_base = OTHER; note = 2'-fluoro uridine
  modified_base 20: mod_base = OTHER; note = 2'O-methyl cytidine phosphorothioate
  modified_base 21: mod_base = OTHER; note = 2'-fluoro uridine
ccaatgtccaccagctcatct

SEQ ID NO: 1407 - RNA, 21 nt, synthetic construct
  source 1..21: mol_type = other RNA
  modified_base 1: mod_base = OTHER; note = 2'-fluoro cytidine phosphorothioate
  modified_base 2: mod_base = OTHER; note = 2'O-methyl adenosine phosphorothioate
  modified_base 3: mod_base = OTHER; note = 2'-fluoro adenosine
  modified_base 4: mod_base = OTHER; note = 2'O-methyl uridine
  modified_base 5: mod_base = OTHER; note = 2'-fluoro guanosine
  modified_base 6: mod_base = OTHER; note = 2'O-methyl uridine
  modified_base 7: mod_base = OTHER; note = 2'-fluoro cytidine
  modified_base 8: mod_base = OTHER; note = 2'O-methyl cytidine
  modified_base 9: mod_base = OTHER; note = 2'-fluoro adenosine
  modified_base 10: mod_base = OTHER; note = 2'O-methyl cytidine
  modified_base 11: mod_base = OTHER; note = 2'-fluoro cytidine
  modified_base 12: mod_base = OTHER; note = 2'O-methyl adenosine
  modified_base 13: mod_base = OTHER; note = 2'-fluoro guanosine
  modified_base 14: mod_base = OTHER; note = 2'O-methyl cytidine
  modified_base 15: mod_base = OTHER; note = 2'-fluoro uridine
  modified_base 16: mod_base = OTHER; note = 2'O-methyl cytidine
  modified_base 17: mod_base = OTHER; note = 2'-fluoro adenosine
  modified_base 18: mod_base = OTHER; note = 2'O-methyl uridine
  modified_base 19: mod_base = OTHER; note = 2'-fluoro cytidine
  modified_base 20: mod_base = OTHER; note = 2'O-methyl uridine phosphorothioate
  modified_base 21: mod_base = OTHER; note = 2'-fluoro cytidine
caatgtccaccagctcatctc

SEQ ID NO: 1408 - RNA, 21 nt, synthetic construct
  source 1..21: mol_type = other RNA
  modified_base 1: mod_base = OTHER; note = 2'-fluoro adenosine phosphorothioate
  modified_base 2: mod_base = OTHER; note = 2'O-methyl uridine phosphorothioate
  modified_base 3: mod_base = OTHER; note = 2'-fluoro guanosine
  modified_base 4: mod_base = OTHER; note = 2'O-methyl uridine
  modified_base 5: mod_base = OTHER; note = 2'-fluoro cytidine
  modified_base 6: mod_base = OTHER; note = 2'O-methyl cytidine
  modified_base 7: mod_base = OTHER; note = 2'-fluoro adenosine
  modified_base 8: mod_base = OTHER; note = 2'O-methyl cytidine
  modified_base 9: mod_base = OTHER; note = 2'-fluoro cytidine
  modified_base 10: mod_base = OTHER; note = 2'O-methyl adenosine
  modified_base 11: mod_base = OTHER; note = 2'-fluoro guanosine
  modified_base 12: mod_base = OTHER; note = 2'O-methyl cytidine
  modified_base 13: mod_base = OTHER; note = 2'-fluoro uridine
  modified_base 14: mod_base = OTHER; note = 2'O-methyl cytidine
  modified_base 15: mod_base = OTHER; note = 2'-fluoro adenosine
  modified_base 16: mod_base = OTHER; note = 2'O-methyl uridine
  modified_base 17: mod_base = OTHER; note = 2'-fluoro cytidine
  modified_base 18: mod_base = OTHER; note = 2'O-methyl uridine
  modified_base 19: mod_base = OTHER; note = 2'-fluoro cytidine
  modified_base 20: mod_base = OTHER; note = 2'O-methyl cytidine phosphorothioate
  modified_base 21: mod_base = OTHER; note = 2'-fluoro guanosine
atgtccaccagctcatctccg

SEQ ID NO: 1409 - RNA, 21 nt, synthetic construct
  source 1..21: mol_type = other RNA
  modified_base 1: mod_base = OTHER; note = 2'-fluoro uridine phosphorothioate
  modified_base 2: mod_base = OTHER; note = 2'O-methyl guanosine phosphorothioate
  modified_base 3: mod_base = OTHER; note = 2'-fluoro uridine
  modified_base 4: mod_base = OTHER; note = 2'O-methyl cytidine
  modified_base 5: mod_base = OTHER; note = 2'-fluoro cytidine
  modified_base 6: mod_base = OTHER; note = 2'O-methyl adenosine
  modified_base 7: mod_base = OTHER; note = 2'-fluoro cytidine
  modified_base 8: mod_base = OTHER; note = 2'O-methyl cytidine
  modified_base 9: mod_base = OTHER; note = 2'-fluoro adenosine
  modified_base 10: mod_base = OTHER; note = 2'O-methyl guanosine
  modified_base 11: mod_base = OTHER; note = 2'-fluoro cytidine
  modified_base 12: mod_base = OTHER; note = 2'O-methyl uridine
  modified_base 13: mod_base = OTHER; note = 2'-fluoro cytidine
  modified_base 14: mod_base = OTHER; note = 2'O-methyl adenosine
  modified_base 15: mod_base = OTHER; note = 2'-fluoro uridine
  modified_base 16: mod_base = OTHER; note = 2'O-methyl cytidine
  modified_base 17: mod_base = OTHER; note = 2'-fluoro uridine
  modified_base 18: mod_base = OTHER; note = 2'O-methyl cytidine
  modified_base 19: mod_base = OTHER; note = 2'-fluoro cytidine
  modified_base 20: mod_base = OTHER; note = 2'O-methyl guanosine phosphorothioate
  modified_base 21: mod_base = OTHER; note = 2'-fluoro guanosine
tgtccaccagctcatctccgg

SEQ ID NO: 1410 - RNA, 21 nt, synthetic construct
  source 1..21: mol_type = other RNA
  modified_base 1: mod_base = OTHER; note = 2'-fluoro guanosine phosphorothioate
  modified_base 2: mod_base = OTHER; note = 2'O-methyl uridine phosphorothioate
  modified_base 3: mod_base = OTHER; note = 2'-fluoro cytidine
  modified_base 4: mod_base = OTHER; note = 2'O-methyl cytidine
  modified_base 5: mod_base = OTHER; note = 2'-fluoro adenosine
  modified_base 6: mod_base = OTHER; note = 2'O-methyl cytidine
  modified_base 7: mod_base = OTHER; note = 2'-fluoro cytidine
  modified_base 8: mod_base = OTHER; note = 2'O-methyl adenosine
  modified_base 9: mod_base = OTHER; note = 2'-fluoro guanosine
  modified_base 10: mod_base = OTHER; note = 2'O-methyl cytidine
  modified_base 11: mod_base = OTHER; note = 2'-fluoro uridine
  modified_base 12: mod_base = OTHER; note = 2'O-methyl cytidine
  modified_base 13: mod_base = OTHER; note = 2'-fluoro adenosine
  modified_base 14: mod_base = OTHER; note = 2'O-methyl uridine
  modified_base 15: mod_base = OTHER; note = 2'-fluoro cytidine
  modified_base 16: mod_base = OTHER; note = 2'O-methyl uridine
  modified_base 17: mod_base = OTHER; note = 2'-fluoro cytidine
  modified_base 18: mod_base = OTHER; note = 2'O-methyl cytidine
  modified_base 19: mod_base = OTHER; note = 2'-fluoro guanosine
  modified_base 20: mod_base = OTHER; note = 2'O-methyl guanosine phosphorothioate
  modified_base 21: mod_base = OTHER; note = 2'-fluoro cytidine
gtccaccagctcatctccggc

SEQ ID NO: 1411 - RNA, 21 nt, synthetic construct
  source 1..21: mol_type = other RNA
  modified_base 1: mod_base = OTHER; note = 2'-fluoro uridine phosphorothioate
  modified_base 2: mod_base = OTHER; note = 2'O-methyl cytidine phosphorothioate
  modified_base 3: mod_base = OTHER; note = 2'-fluoro cytidine
  modified_base 4: mod_base = OTHER; note = 2'O-methyl adenosine
  modified_base 5: mod_base = OTHER; note = 2'-fluoro cytidine
  modified_base 6: mod_base = OTHER; note = 2'O-methyl cytidine
  modified_base 7: mod_base = OTHER; note = 2'-fluoro adenosine
  modified_base 8: mod_base = OTHER; note = 2'O-methyl guanosine
  modified_base 9: mod_base = OTHER; note = 2'-fluoro cytidine
  modified_base 10: mod_base = OTHER; note = 2'O-methyl uridine
  modified_base 11: mod_base = OTHER; note = 2'-fluoro cytidine
  modified_base 12: mod_base = OTHER; note = 2'O-methyl adenosine
  modified_base 13: mod_base = OTHER; note = 2'-fluoro uridine
  modified_base 14: mod_base = OTHER; note = 2'O-methyl cytidine
  modified_base 15: mod_base = OTHER; note = 2'-fluoro uridine
  modified_base 16: mod_base = OTHER; note = 2'O-methyl cytidine
  modified_base 17: mod_base = OTHER; note = 2'-fluoro cytidine
  modified_base 18: mod_base = OTHER; note = 2'O-methyl guanosine
  modified_base 19: mod_base = OTHER; note = 2'-fluoro guanosine
  modified_base 20: mod_base = OTHER; note = 2'O-methyl cytidine phosphorothioate
  modified_base 21: mod_base = OTHER; note = 2'-fluoro adenosine
tccaccagctcatctccggca

SEQ ID NO: 1412 - RNA, 21 nt, synthetic construct
  source 1..21: mol_type = other RNA
  modified_base 1: mod_base = OTHER; note = 2'-fluoro cytidine phosphorothioate
  modified_base 2: mod_base = OTHER; note = 2'O-methyl adenosine phosphorothioate
  modified_base 3: mod_base = OTHER; note = 2'-fluoro cytidine
  modified_base 4: mod_base = OTHER; note = 2'O-methyl cytidine
  modified_base 5: mod_base = OTHER; note = 2'-fluoro adenosine
  modified_base 6: mod_base = OTHER; note = 2'O-methyl guanosine
  modified_base 7: mod_base = OTHER; note = 2'-fluoro cytidine
  modified_base 8: mod_base = OTHER; note = 2'O-methyl uridine
  modified_base 9: mod_base = OTHER; note = 2'-fluoro cytidine
  modified_base 10: mod_base = OTHER; note = 2'O-methyl adenosine
  modified_base 11: mod_base = OTHER; note = 2'-fluoro uridine
  modified_base 12: mod_base = OTHER; note = 2'O-methyl cytidine
  modified_base 13: mod_base = OTHER; note = 2'-fluoro uridine
  modified_base 14: mod_base = OTHER; note = 2'O-methyl cytidine
  modified_base 15: mod_base = OTHER; note = 2'-fluoro cytidine
  modified_base 16: mod_base = OTHER; note = 2'O-methyl guanosine
  modified_base 17: mod_base = OTHER; note = 2'-fluoro guanosine
  modified_base 18: mod_base = OTHER; note = 2'O-methyl cytidine
  modified_base 19: mod_base = OTHER; note = 2'-fluoro adenosine
  modified_base 20: mod_base = OTHER; note = 2'O-methyl adenosine phosphorothioate
  modified_base 21: mod_base = OTHER; note = 2'-fluoro adenosine
caccagctcatctccggcaaa

SEQ ID NO: 1413 - RNA, 21 nt, synthetic construct
  source 1..21: mol_type = other RNA
  modified_base 1: mod_base = OTHER; note = 2'-fluoro uridine phosphorothioate
  modified_base 2: mod_base = OTHER; note = 2'O-methyl cytidine phosphorothioate
  modified_base 3: mod_base = OTHER; note = 2'-fluoro uridine
  modified_base 4: mod_base = OTHER; note = 2'O-methyl uridine
  modified_base 5: mod_base = OTHER; note = 2'-fluoro adenosine
  modified_base 6: mod_base = OTHER; note = 2'O-methyl cytidine
  modified_base 7: mod_base = OTHER; note = 2'-fluoro cytidine
  modified_base 8: mod_base = OTHER; note = 2'O-methyl adenosine
  modified_base 9: mod_base = OTHER; note = 2'-fluoro guanosine
  modified_base 10: mod_base = OTHER; note = 2'O-methyl adenosine
  modified_base 11: mod_base = OTHER; note = 2'-fluoro guanosine
  modified_base 12: mod_base = OTHER; note = 2'O-methyl uridine
  modified_base 13: mod_base = OTHER; note = 2'-fluoro guanosine
  modified_base 14: mod_base = OTHER; note = 2'O-methyl uridine
  modified_base 15: mod_base = OTHER; note = 2'-fluoro cytidine
  modified_base 16: mod_base = OTHER; note = 2'O-methyl uridine
  modified_base 17: mod_base = OTHER; note = 2'-fluoro guanosine
  modified_base 18: mod_base = OTHER; note = 2'O-methyl adenosine
  modified_base 19: mod_base = OTHER; note = 2'-fluoro uridine
  modified_base 20: mod_base = OTHER; note = 2'O-methyl guanosine phosphorothioate
  modified_base 21: mod_base = OTHER; note = 2'-fluoro guanosine
tcttaccagagtgtctgatgg

SEQ ID NO: 1414 - RNA, 21 nt, synthetic construct
  source 1..21: mol_type = other RNA
  modified_base 1: mod_base = OTHER; note = 2'-fluoro cytidine phosphorothioate
  modified_base 2: mod_base = OTHER; note = 2'O-methyl uridine phosphorothioate
  modified_base 3: mod_base = OTHER; note = 2'-fluoro uridine
  modified_base 4: mod_base = OTHER; note = 2'O-methyl adenosine
  modified_base 5: mod_base = OTHER; note = 2'-fluoro cytidine
  modified_base 6: mod_base = OTHER; note = 2'O-methyl cytidine
  modified_base 7: mod_base = OTHER; note = 2'-fluoro adenosine
  modified_base 8: mod_base = OTHER; note = 2'O-methyl guanosine
  modified_base 9: mod_base = OTHER; note = 2'-fluoro adenosine
  modified_base 10: mod_base = OTHER; note = 2'O-methyl guanosine
  modified_base 11: mod_base = OTHER; note = 2'-fluoro uridine
  modified_base 12: mod_base = OTHER; note = 2'O-methyl guanosine
  modified_base 13: mod_base = OTHER; note = 2'-fluoro uridine
  modified_base 14: mod_base = OTHER; note = 2'O-methyl cytidine
  modified_base 15: mod_base = OTHER; note = 2'-fluoro uridine
  modified_base 16: mod_base = OTHER; note = 2'O-methyl guanosine
  modified_base 17: mod_base = OTHER; note = 2'-fluoro adenosine
  modified_base 18: mod_base = OTHER; note = 2'O-methyl uridine
  modified_base 19: mod_base = OTHER; note = 2'-fluoro guanosine
  modified_base 20: mod_base = OTHER; note = 2'O-methyl guanosine phosphorothioate
  modified_base 21: mod_base = OTHER; note = 2'-fluoro guanosine
cttaccagagtgtctgatggg

SEQ ID NO: 1415 - RNA, 21 nt, synthetic construct
  source 1..21: mol_type = other RNA
  modified_base 1: mod_base = OTHER; note = 2'-fluoro uridine phosphorothioate
  modified_base 2: mod_base = OTHER; note = 2'O-methyl uridine phosphorothioate
  modified_base 3: mod_base = OTHER; note = 2'-fluoro adenosine
  modified_base 4: mod_base = OTHER; note = 2'O-methyl cytidine
  modified_base 5: mod_base = OTHER; note = 2'-fluoro cytidine
  modified_base 6: mod_base = OTHER; note = 2'O-methyl adenosine
  modified_base 7: mod_base = OTHER; note = 2'-fluoro guanosine
  modified_base 8: mod_base = OTHER; note = 2'O-methyl adenosine
  modified_base 9: mod_base = OTHER; note = 2'-fluoro guanosine
  modified_base 10: mod_base = OTHER; note = 2'O-methyl uridine
  modified_base 11: mod_base = OTHER; note = 2'-fluoro guanosine
  modified_base 12: mod_base = OTHER; note = 2'O-methyl uridine
  modified_base 13: mod_base = OTHER; note = 2'-fluoro cytidine
  modified_base 14: mod_base = OTHER; note = 2'O-methyl uridine
  modified_base 15: mod_base = OTHER; note = 2'-fluoro guanosine
  modified_base 16: mod_base = OTHER; note = 2'O-methyl adenosine
  modified_base 17: mod_base = OTHER; note = 2'-fluoro uridine
  modified_base 18: mod_base = OTHER; note = 2'O-methyl guanosine
  modified_base 19: mod_base = OTHER; note = 2'-fluoro guanosine
  modified_base 20: mod_base = OTHER; note = 2'O-methyl guanosine phosphorothioate
  modified_base 21: mod_base = OTHER; note = 2'-fluoro guanosine
ttaccagagtgtctgatgggg

SEQ ID NO: 1416 - RNA, 21 nt, synthetic construct
  source 1..21: mol_type = other RNA
  modified_base 1: mod_base = OTHER; note = 2'-fluoro uridine phosphorothioate
  modified_base 2: mod_base = OTHER; note = 2'O-methyl adenosine phosphorothioate
  modified_base 3: mod_base = OTHER; note = 2'-fluoro cytidine
  modified_base 4: mod_base = OTHER; note = 2'O-methyl cytidine
  modified_base 5: mod_base = OTHER; note = 2'-fluoro adenosine
  modified_base 6: mod_base = OTHER; note = 2'O-methyl guanosine
  modified_base 7: mod_base = OTHER; note = 2'-fluoro adenosine
  modified_base 8: mod_base = OTHER; note = 2'O-methyl guanosine
  modified_base 9: mod_base = OTHER; note = 2'-fluoro uridine
  modified_base 10: mod_base = OTHER; note = 2'O-methyl guanosine
  modified_base 11: mod_base = OTHER; note = 2'-fluoro uridine
  modified_base 12: mod_base = OTHER; note = 2'O-methyl cytidine
  modified_base 13: mod_base = OTHER; note = 2'-fluoro uridine
  modified_base 14: mod_base = OTHER; note = 2'O-methyl guanosine
  modified_base 15: mod_base = OTHER; note = 2'-fluoro adenosine
  modified_base 16: mod_base = OTHER; note = 2'O-methyl uridine
  modified_base 17: mod_base = OTHER; note = 2'-fluoro guanosine
  modified_base 18: mod_base = OTHER; note = 2'O-methyl guanosine
  modified_base 19: mod_base = OTHER; note = 2'-fluoro guanosine
  modified_base 20: mod_base = OTHER; note = 2'O-methyl guanosine phosphorothioate
  modified_base 21: mod_base = OTHER; note = 2'-fluoro adenosine
taccagagtgtctgatgggga

SEQ ID NO: 1417 - RNA, 21 nt, synthetic construct
  source 1..21: mol_type = other RNA
  modified_base 1: mod_base = OTHER; note = 2'-fluoro cytidine phosphorothioate
  modified_base 2: mod_base = OTHER; note = 2'O-methyl adenosine phosphorothioate
  modified_base 3: mod_base = OTHER; note = 2'-fluoro guanosine
  modified_base 4: mod_base = OTHER; note = 2'O-methyl adenosine
  modified_base 5: mod_base = OTHER; note = 2'-fluoro guanosine
  modified_base 6: mod_base = OTHER; note = 2'O-methyl uridine
  modified_base 7: mod_base = OTHER; note = 2'-fluoro guanosine
  modified_base 8: mod_base = OTHER; note = 2'O-methyl uridine
  modified_base 9: mod_base = OTHER; note = 2'-fluoro cytidine
  modified_base 10: mod_base = OTHER; note = 2'O-methyl uridine
  modified_base 11: mod_base = OTHER; note = 2'-fluoro guanosine
  modified_base 12: mod_base = OTHER; note = 2'O-methyl adenosine
  modified_base 13: mod_base = OTHER; note = 2'-fluoro uridine
  modified_base 14: mod_base = OTHER; note = 2'O-methyl guanosine
  modified_base 15: mod_base = OTHER; note = 2'-fluoro guanosine
  modified_base 16: mod_base = OTHER; note = 2'O-methyl guanosine
  modified_base 17: mod_base = OTHER; note = 2'-fluoro guanosine
  modified_base 18: mod_base = OTHER; note = 2'O-methyl adenosine
  modified_base 19: mod_base = OTHER; note = 2'-fluoro adenosine
  modified_base 20: mod_base = OTHER; note = 2'O-methyl adenosine phosphorothioate
  modified_base 21: mod_base = OTHER; note = 2'-fluoro adenosine
cagagtgtctgatggggaaaa

SEQ ID NO: 1418 - RNA, 21 nt, synthetic construct
  source 1..21: mol_type = other RNA
  modified_base 1: mod_base = OTHER; note = 2'-fluoro adenosine phosphorothioate
  modified_base 2: mod_base = OTHER; note = 2'O-methyl guanosine phosphorothioate
  modified_base 3: mod_base = OTHER; note = 2'-fluoro adenosine
  modified_base 4: mod_base = OTHER; note = 2'O-methyl guanosine
  modified_base 5: mod_base = OTHER; note = 2'-fluoro uridine
  modified_base 6: mod_base = OTHER; note = 2'O-methyl guanosine
  modified_base 7: mod_base = OTHER; note = 2'-fluoro uridine
  modified_base 8: mod_base = OTHER; note = 2'O-methyl cytidine
  modified_base 9: mod_base = OTHER; note = 2'-fluoro uridine
  modified_base 10: mod_base = OTHER; note = 2'O-methyl guanosine
  modified_base 11: mod_base = OTHER; note = 2'-fluoro adenosine
  modified_base 12: mod_base = OTHER; note = 2'O-methyl uridine
  modified_base 13: mod_base = OTHER; note = 2'-fluoro guanosine
  modified_base 14: mod_base = OTHER; note = 2'O-methyl guanosine
  modified_base 15: mod_base = OTHER; note = 2'-fluoro guanosine
  modified_base 16: mod_base = OTHER; note = 2'O-methyl guanosine
  modified_base 17: mod_base = OTHER; note = 2'-fluoro adenosine
  modified_base 18: mod_base = OTHER; note = 2'O-methyl adenosine
  modified_base 19: mod_base = OTHER; note = 2'-fluoro adenosine
  modified_base 20: mod_base = OTHER; note = 2'O-methyl adenosine phosphorothioate
  modified_base 21: mod_base = OTHER; note = 2'-fluoro cytidine
agagtgtctgatggggaaaac

SEQ ID NO: 1419 - RNA, 21 nt, synthetic construct
  source 1..21: mol_type = other RNA
  modified_base 1: mod_base = OTHER; note = 2'-fluoro guanosine phosphorothioate
  modified_base 2: mod_base = OTHER; note = 2'O-methyl adenosine phosphorothioate
  modified_base 3: mod_base = OTHER; note = 2'-fluoro guanosine
  modified_base 4: mod_base = OTHER; note = 2'O-methyl uridine
  modified_base 5: mod_base = OTHER; note = 2'-fluoro guanosine
  modified_base 6: mod_base = OTHER; note = 2'O-methyl uridine
  modified_base 7: mod_base = OTHER; note = 2'-fluoro cytidine
  modified_base 8: mod_base = OTHER; note = 2'O-methyl uridine
  modified_base 9: mod_base = OTHER; note = 2'-fluoro guanosine
  modified_base 10: mod_base = OTHER; note = 2'O-methyl adenosine
  modified_base 11: mod_base = OTHER; note = 2'-fluoro uridine
  modified_base 12: mod_base = OTHER; note = 2'O-methyl guanosine
  modified_base 13: mod_base = OTHER; note = 2'-fluoro guanosine
  modified_base 14: mod_base = OTHER; note = 2'O-methyl guanosine
  modified_base 15: mod_base = OTHER; note = 2'-fluoro guanosine
  modified_base 16: mod_base = OTHER; note = 2'O-methyl adenosine
  modified_base 17: mod_base = OTHER; note = 2'-fluoro adenosine
  modified_base 18: mod_base = OTHER; note = 2'O-methyl adenosine
  modified_base 19: mod_base = OTHER; note = 2'-fluoro adenosine
  modified_base 20: mod_base = OTHER; note = 2'O-methyl cytidine phosphorothioate
  modified_base 21: mod_base = OTHER; note = 2'-fluoro guanosine
gagtgtctgatggggaaaacg

SEQ ID NO: 1420 - RNA, 21 nt, synthetic construct
  source 1..21: mol_type = other RNA
  modified_base 1: mod_base = OTHER; note = 2'-fluoro adenosine phosphorothioate
  modified_base 2: mod_base = OTHER; note = 2'O-methyl guanosine phosphorothioate
  modified_base 3: mod_base = OTHER; note = 2'-fluoro uridine
  modified_base 4: mod_base = OTHER; note = 2'O-methyl guanosine
  modified_base 5: mod_base = OTHER; note = 2'-fluoro uridine
  modified_base 6: mod_base = OTHER; note = 2'O-methyl cytidine
  modified_base 7: mod_base = OTHER; note = 2'-fluoro uridine
  modified_base 8: mod_base = OTHER; note = 2'O-methyl guanosine
  modified_base 9: mod_base = OTHER; note = 2'-fluoro adenosine
  modified_base 10: mod_base = OTHER; note = 2'O-methyl uridine
  modified_base 11: mod_base = OTHER; note = 2'-fluoro guanosine
  modified_base 12: mod_base = OTHER; note = 2'O-methyl guanosine
  modified_base 13: mod_base = OTHER; note = 2'-fluoro guanosine
  modified_base 14: mod_base = OTHER; note = 2'O-methyl guanosine
  modified_base 15: mod_base = OTHER; note = 2'-fluoro adenosine
  modified_base 16: mod_base = OTHER; note = 2'O-methyl adenosine
  modified_base 17: mod_base = OTHER; note = 2'-fluoro adenosine
  modified_base 18: mod_base = OTHER; note = 2'O-methyl adenosine
  modified_base 19: mod_base = OTHER; note = 2'-fluoro cytidine
  modified_base 20: mod_base = OTHER; note = 2'O-methyl guanosine phosphorothioate
  modified_base 21: mod_base = OTHER; note = 2'-fluoro uridine
agtgtctgatggggaaaacgt

SEQ ID NO: 1421 - RNA, 21 nt, synthetic construct
  source 1..21: mol_type = other RNA
  modified_base 1: mod_base = OTHER; note = 2'-fluoro guanosine phosphorothioate
  modified_base 2: mod_base = OTHER; note = 2'O-methyl uridine phosphorothioate
  modified_base 3: mod_base = OTHER; note = 2'-fluoro guanosine
  modified_base 4: mod_base = OTHER; note = 2'O-methyl uridine
  modified_base 5: mod_base = OTHER; note = 2'-fluoro cytidine
  modified_base 6: mod_base = OTHER; note = 2'O-methyl uridine
  modified_base 7: mod_base = OTHER; note = 2'-fluoro guanosine
  modified_base 8: mod_base = OTHER; note = 2'O-methyl adenosine
  modified_base 9: mod_base = OTHER; note = 2'-fluoro uridine
  modified_base 10: mod_base = OTHER; note = 2'O-methyl guanosine
  modified_base 11: mod_base = OTHER; note = 2'-fluoro guanosine
  modified_base 12: mod_base = OTHER; note = 2'O-methyl guanosine
  modified_base 13: mod_base = OTHER; note = 2'-fluoro guanosine
  modified_base 14: mod_base = OTHER; note = 2'O-methyl adenosine
  modified_base 15: mod_base = OTHER; note = 2'-fluoro adenosine
  modified_base 16: mod_base = OTHER; note = 2'O-methyl adenosine
  modified_base 17: mod_base = OTHER; note = 2'-fluoro adenosine
  modified_base 18: mod_base = OTHER; note = 2'O-methyl cytidine
  modified_base 19: mod_base = OTHER; note = 2'-fluoro guanosine
  modified_base 20: mod_base = OTHER; note = 2'O-methyl uridine phosphorothioate
  modified_base 21: mod_base = OTHER; note = 2'-fluoro uridine
gtgtctgatggggaaaacgtt

SEQ ID NO: 1422 - RNA, 21 nt, synthetic construct
  source 1..21: mol_type = other RNA
  modified_base 1: mod_base = OTHER; note = 2'-fluoro uridine phosphorothioate
  modified_base 2: mod_base = OTHER; note = 2'O-methyl guanosine phosphorothioate
  modified_base 3: mod_base = OTHER; note = 2'-fluoro uridine
  modified_base 4: mod_base = OTHER; note = 2'O-methyl cytidine
  modified_base 5: mod_base = OTHER; note = 2'-fluoro uridine
  modified_base 6: mod_base = OTHER; note = 2'O-methyl guanosine
  modified_base 7: mod_base = OTHER; note = 2'-fluoro adenosine
  modified_base 8: mod_base = OTHER; note = 2'O-methyl uridine
  modified_base 9: mod_base = OTHER; note = 2'-fluoro guanosine
  modified_base 10: mod_base = OTHER; note = 2'O-methyl guanosine
  modified_base 11: mod_base = OTHER; note = 2'-fluoro guanosine
  modified_base 12: mod_base = OTHER; note = 2'O-methyl guanosine
  modified_base 13: mod_base = OTHER; note = 2'-fluoro adenosine
  modified_base 14: mod_base = OTHER; note = 2'O-methyl adenosine
  modified_base 15: mod_base = OTHER; note = 2'-fluoro adenosine
  modified_base 16: mod_base = OTHER; note = 2'O-methyl adenosine
  modified_base 17: mod_base = OTHER; note = 2'-fluoro cytidine
  modified_base 18: mod_base = OTHER; note = 2'O-methyl guanosine
  modified_base 19: mod_base = OTHER; note = 2'-fluoro uridine
  modified_base 20: mod_base = OTHER; note = 2'O-methyl uridine phosphorothioate
  modified_base 21: mod_base = OTHER; note = 2'-fluoro cytidine
tgtctgatggggaaaacgttc

SEQ ID NO: 1423 - RNA, 21 nt, synthetic construct
  source 1..21: mol_type = other RNA
  modified_base 1: mod_base = OTHER; note = 2'-fluoro guanosine phosphorothioate
  modified_base 2: mod_base = OTHER; note = 2'O-methyl uridine phosphorothioate
  modified_base 3: mod_base = OTHER; note = 2'-fluoro cytidine
  modified_base 4: mod_base = OTHER; note = 2'O-methyl uridine
  modified_base 5: mod_base = OTHER; note = 2'-fluoro guanosine
  modified_base 6: mod_base = OTHER; note = 2'O-methyl adenosine
  modified_base 7: mod_base = OTHER; note = 2'-fluoro uridine
  modified_base 8: mod_base = OTHER; note = 2'O-methyl guanosine
  modified_base 9: mod_base = OTHER; note = 2'-fluoro guanosine
  modified_base 10: mod_base = OTHER; note = 2'O-methyl guanosine
  modified_base 11: mod_base = OTHER; note = 2'-fluoro guanosine
  modified_base 12: mod_base = OTHER; note = 2'O-methyl adenosine
  modified_base 13: mod_base = OTHER; note = 2'-fluoro adenosine
  modified_base 14: mod_base = OTHER; note = 2'O-methyl adenosine
  modified_base 15: mod_base = OTHER; note = 2'-fluoro adenosine
  modified_base 16: mod_base = OTHER; note = 2'O-methyl cytidine
  modified_base 17: mod_base = OTHER; note = 2'-fluoro guanosine
  modified_base 18: mod_base = OTHER; note = 2'O-methyl uridine
  modified_base 19: mod_base = OTHER; note = 2'-fluoro uridine
  modified_base 20: mod_base = OTHER; note = 2'O-methyl cytidine phosphorothioate
  modified_base 21: mod_base = OTHER; note = 2'-fluoro uridine
gtctgatggggaaaacgttct

SEQ ID NO: 1424 - RNA, 21 nt, synthetic construct
  source 1..21: mol_type = other RNA
  modified_base 1: mod_base = OTHER; note = 2'-fluoro uridine phosphorothioate
  modified_base 2: mod_base = OTHER; note = 2'O-methyl cytidine phosphorothioate
  modified_base 3: mod_base = OTHER; note = 2'-fluoro uridine
  modified_base 4: mod_base = OTHER; note = 2'O-methyl guanosine
  modified_base 5: mod_base = OTHER; note = 2'-fluoro adenosine
  modified_base 6: mod_base = OTHER; note = 2'O-methyl uridine
  modified_base 7: mod_base = OTHER; note = 2'-fluoro guanosine
  modified_base 8: mod_base = OTHER; note = 2'O-methyl guanosine
  modified_base 9: mod_base = OTHER; note = 2'-fluoro guanosine
  modified_base 10: mod_base = OTHER; note = 2'O-methyl guanosine
  modified_base 11: mod_base = OTHER; note = 2'-fluoro adenosine
  modified_base 12: mod_base = OTHER; note = 2'O-methyl adenosine
  modified_base 13: mod_base = OTHER; note = 2'-fluoro adenosine
  modified_base 14: mod_base = OTHER; note = 2'O-methyl adenosine
  modified_base 15: mod_base = OTHER; note = 2'-fluoro cytidine
  modified_base 16: mod_base = OTHER; note = 2'O-methyl guanosine
  modified_base 17: mod_base = OTHER; note = 2'-fluoro uridine
  modified_base 18: mod_base = OTHER; note = 2'O-methyl uridine
  modified_base 19: mod_base = OTHER; note = 2'-fluoro cytidine
  modified_base 20: mod_base = OTHER; note = 2'O-methyl uridine phosphorothioate
  modified_base 21: mod_base = OTHER; note = 2'-fluoro guanosine
tctgatggggaaaacgttctg

SEQ ID NO: 1425 - RNA, 21 nt, synthetic construct
  source 1..21: mol_type = other RNA
  modified_base 1: mod_base = OTHER; note = 2'-fluoro cytidine phosphorothioate
  modified_base 2: mod_base = OTHER; note = 2'O-methyl uridine phosphorothioate
  modified_base 3: mod_base = OTHER; note = 2'-fluoro guanosine
  modified_base 4: mod_base = OTHER; note = 2'O-methyl adenosine
  modified_base 5: mod_base = OTHER; note = 2'-fluoro uridine
  modified_base 6: mod_base = OTHER; note = 2'O-methyl guanosine
  modified_base 7: mod_base = OTHER; note = 2'-fluoro guanosine
  modified_base 8: mod_base = OTHER; note = 2'O-methyl guanosine
  modified_base 9: mod_base = OTHER; note = 2'-fluoro guanosine
  modified_base 10: mod_base = OTHER; note = 2'O-methyl adenosine
  modified_base 11: mod_base = OTHER; note = 2'-fluoro adenosine
  modified_base 12: mod_base = OTHER; note = 2'O-methyl adenosine
  modified_base 13: mod_base = OTHER; note = 2'-fluoro adenosine
  modified_base 14: mod_base = OTHER; note = 2'O-methyl cytidine
  modified_base 15: mod_base = OTHER; note = 2'-fluoro guanosine
  modified_base 16: mod_base = OTHER; note = 2'O-methyl uridine
  modified_base 17: mod_base = OTHER; note = 2'-fluoro uridine
  modified_base 18: mod_base = OTHER; note = 2'O-methyl cytidine
  modified_base 19: mod_base = OTHER; note = 2'-fluoro uridine
  modified_base 20: mod_base = OTHER; note = 2'O-methyl guanosine phosphorothioate
  modified_base 21: mod_base = OTHER; note = 2'-fluoro guanosine
ctgatggggaaaacgttctgg

SEQ ID NO: 1426 - RNA, 21 nt, synthetic construct
  source 1..21: mol_type = other RNA
  modified_base 1: mod_base = OTHER; note = 2'-fluoro uridine phosphorothioate
  modified_base 2: mod_base = OTHER; note = 2'O-methyl guanosine phosphorothioate
  modified_base 3: mod_base = OTHER; note = 2'-fluoro adenosine
  modified_base 4: mod_base = OTHER; note = 2'O-methyl uridine
  modified_base 5: mod_base = OTHER; note = 2'-fluoro guanosine
  modified_base 6: mod_base = OTHER; note = 2'O-methyl guanosine
  modified_base 7: mod_base = OTHER; note = 2'-fluoro guanosine
  modified_base 8: mod_base = OTHER; note = 2'O-methyl guanosine
  modified_base 9: mod_base = OTHER; note = 2'-fluoro adenosine
  modified_base 10: mod_base = OTHER; note = 2'O-methyl adenosine
  modified_base 11: mod_base = OTHER; note = 2'-fluoro adenosine
  modified_base 12: mod_base = OTHER; note = 2'O-methyl adenosine
  modified_base 13: mod_base = OTHER; note = 2'-fluoro cytidine
  modified_base 14: mod_base = OTHER; note = 2'O-methyl guanosine
  modified_base 15: mod_base = OTHER; note = 2'-fluoro uridine
  modified_base 16: mod_base = OTHER; note = 2'O-methyl uridine
  modified_base 17: mod_base = OTHER; note = 2'-fluoro cytidine
  modified_base 18: mod_base = OTHER; note = 2'O-methyl uridine
  modified_base 19: mod_base = OTHER; note = 2'-fluoro guanosine
  modified_base 20: mod_base = OTHER; note = 2'O-methyl guanosine phosphorothioate
  modified_base 21: mod_base = OTHER; note = 2'-fluoro uridine
tgatggggaaaacgttctggt

SEQ ID NO: 1427 - RNA, 21 nt, synthetic construct
  source 1..21: mol_type = other RNA
  modified_base 1: mod_base = OTHER; note = 2'-fluoro guanosine phosphorothioate
  modified_base 2: mod_base = OTHER; note = 2'O-methyl adenosine phosphorothioate
  modified_base 3: mod_base = OTHER; note = 2'-fluoro uridine
  modified_base 4: mod_base = OTHER; note = 2'O-methyl guanosine
  modified_base 5: mod_base = OTHER; note = 2'-fluoro guanosine
  modified_base 6: mod_base = OTHER; note = 2'O-methyl guanosine
  modified_base 7: mod_base = OTHER; note = 2'-fluoro guanosine
  modified_base 8: mod_base = OTHER; note = 2'O-methyl adenosine
  modified_base 9: mod_base = OTHER; note = 2'-fluoro adenosine
  modified_base 10: mod_base = OTHER; note = 2'O-methyl adenosine
  modified_base 11: mod_base = OTHER; note = 2'-fluoro adenosine
  modified_base 12: mod_base = OTHER; note = 2'O-methyl cytidine
  modified_base 13: mod_base = OTHER; note = 2'-fluoro guanosine
  modified_base 14: mod_base = OTHER; note = 2'O-methyl uridine
  modified_base 15: mod_base = OTHER; note = 2'-fluoro uridine
  modified_base 16: mod_base = OTHER; note = 2'O-methyl cytidine
  modified_base 17: mod_base = OTHER; note = 2'-fluoro uridine
  modified_base 18: mod_base = OTHER; note = 2'O-methyl guanosine
  modified_base 19: mod_base = OTHER; note = 2'-fluoro guanosine
  modified_base 20: mod_base = OTHER; note = 2'O-methyl uridine phosphorothioate
  modified_base 21: mod_base = OTHER; note = 2'-fluoro guanosine
gatggggaaaacgttctggtg

SEQ ID NO: 1428 - RNA, 21 nt, synthetic construct
  source 1..21: mol_type = other RNA
  modified_base 1: mod_base = OTHER; note = 2'-fluoro uridine phosphorothioate
  modified_base 2: mod_base = OTHER; note = 2'O-methyl guanosine phosphorothioate
  modified_base 3: mod_base = OTHER; note = 2'-fluoro guanosine
  modified_base 4: mod_base = OTHER; note = 2'O-methyl guanosine
  modified_base 5: mod_base = OTHER; note = 2'-fluoro guanosine
  modified_base 6: mod_base = OTHER; note = 2'O-methyl adenosine
  modified_base 7: mod_base = OTHER; note = 2'-fluoro adenosine
  modified_base 8: mod_base = OTHER; note = 2'O-methyl adenosine
  modified_base 9: mod_base = OTHER; note = 2'-fluoro adenosine
  modified_base 10: mod_base = OTHER; note = 2'O-methyl cytidine
  modified_base 11: mod_base = OTHER; note = 2'-fluoro guanosine
  modified_base 12: mod_base = OTHER; note = 2'O-methyl uridine
  modified_base 13: mod_base = OTHER; note = 2'-fluoro uridine
  modified_base 14: mod_base = OTHER; note = 2'O-methyl cytidine
  modified_base 15: mod_base = OTHER; note = 2'-fluoro uridine
  modified_base 16: mod_base = OTHER; note = 2'O-methyl guanosine
  modified_base 17: mod_base = OTHER; note = 2'-fluoro guanosine
  modified_base 18: mod_base = OTHER; note = 2'O-methyl uridine
  modified_base 19: mod_base = OTHER; note = 2'-fluoro guanosine
  modified_base 20: mod_base = OTHER; note = 2'O-methyl uridine phosphorothioate
  modified_base 21: mod_base = OTHER; note = 2'-fluoro cytidine
tggggaaaacgttctggtgtc

SEQ ID NO: 1429 - RNA, 21 nt, synthetic construct
  source 1..21: mol_type = other RNA
  modified_base 1: mod_base = OTHER; note = 2'-fluoro guanosine phosphorothioate
  modified_base 2: mod_base = OTHER; note = 2'O-methyl guanosine phosphorothioate
  modified_base 3: mod_base = OTHER; note = 2'-fluoro guanosine
  modified_base 4: mod_base = OTHER; note = 2'O-methyl adenosine
  modified_base 5: mod_base = OTHER; note = 2'-fluoro adenosine
  modified_base 6: mod_base = OTHER; note = 2'O-methyl adenosine
  modified_base 7: mod_base = OTHER; note = 2'-fluoro adenosine
  modified_base 8: mod_base = OTHER; note = 2'O-methyl cytidine
  modified_base 9: mod_base = OTHER; note = 2'-fluoro guanosine
  modified_base 10: mod_base = OTHER; note = 2'O-methyl uridine
  modified_base 11: mod_base = OTHER; note = 2'-fluoro uridine
  modified_base 12: mod_base = OTHER; note = 2'O-methyl cytidine
  modified_base 13: mod_base = OTHER; note = 2'-fluoro uridine
  modified_base 14: mod_base = OTHER; note = 2'O-methyl guanosine
  modified_base 15: mod_base = OTHER; note = 2'-fluoro guanosine
  modified_base 16: mod_base = OTHER; note = 2'O-methyl uridine
  modified_base 17: mod_base = OTHER; note = 2'-fluoro guanosine
  modified_base 18: mod_base = OTHER; note = 2'O-methyl uridine
  modified_base 19: mod_base = OTHER; note = 2'-fluoro cytidine
  modified_base 20: mod_base = OTHER; note = 2'O-methyl uridine phosphorothioate
  modified_base 21: mod_base = OTHER; note = 2'-fluoro guanosine
gggaaaacgttctggtgtctg

SEQ ID NO: 1430 - RNA, 21 nt, synthetic construct
  source 1..21: mol_type = other RNA
  modified_base 1: mod_base = OTHER; note = 2'-fluoro guanosine phosphorothioate
  modified_base 2: mod_base = OTHER; note = 2'O-methyl guanosine phosphorothioate
  modified_base 3: mod_base = OTHER; note = 2'-fluoro adenosine
  modified_base 4: mod_base = OTHER; note = 2'O-methyl adenosine
  modified_base 5: mod_base = OTHER; note = 2'-fluoro adenosine
  modified_base 6: mod_base = OTHER; note = 2'O-methyl adenosine
  modified_base 7: mod_base = OTHER; note = 2'-fluoro cytidine
  modified_base 8: mod_base = OTHER; note = 2'O-methyl guanosine
  modified_base 9: mod_base = OTHER; note = 2'-fluoro uridine
  modified_base 10: mod_base = OTHER; note = 2'O-methyl uridine
  modified_base 11: mod_base = OTHER; note = 2'-fluoro cytidine
  modified_base 12: mod_base = OTHER; note = 2'O-methyl uridine
  modified_base 13: mod_base = OTHER; note = 2'-fluoro guanosine
  modified_base 14: mod_base = OTHER; note = 2'O-methyl guanosine
  modified_base 15: mod_base = OTHER; note = 2'-fluoro uridine
  modified_base 16: mod_base = OTHER; note = 2'O-methyl guanosine
  modified_base 17: mod_base = OTHER; note = 2'-fluoro uridine
  modified_base 18: mod_base = OTHER; note = 2'O-methyl cytidine
  modified_base 19: mod_base = OTHER; note = 2'-fluoro uridine
  modified_base 20: mod_base = OTHER; note = 2'O-methyl guanosine phosphorothioate
  modified_base 21: mod_base = OTHER; note = 2'-fluoro adenosine
ggaaaacgttctggtgtctga

SEQ ID NO: 1431 - RNA, 21 nt, synthetic construct
  source 1..21: mol_type = other RNA
  modified_base 1: mod_base = OTHER; note = 2'-fluoro adenosine phosphorothioate
  modified_base 2: mod_base = OTHER; note = 2'O-methyl adenosine phosphorothioate
  modified_base 3: mod_base = OTHER; note = 2'-fluoro adenosine
  modified_base 4: mod_base = OTHER; note = 2'O-methyl cytidine
  modified_base 5: mod_base = OTHER; note = 2'-fluoro guanosine
  modified_base 6: mod_base = OTHER; note = 2'O-methyl uridine
  modified_base 7: mod_base = OTHER; note = 2'-fluoro uridine
  modified_base 8: mod_base = OTHER; note = 2'O-methyl cytidine
  modified_base 9: mod_base = OTHER; note = 2'-fluoro uridine
  modified_base 10: mod_base = OTHER; note = 2'O-methyl guanosine
  modified_base 11: mod_base = OTHER; note = 2'-fluoro guanosine
  modified_base 12: mod_base = OTHER; note = 2'O-methyl uridine
  modified_base 13: mod_base = OTHER; note = 2'-fluoro guanosine
  modified_base 14: mod_base = OTHER; note = 2'O-methyl uridine
  modified_base 15: mod_base = OTHER; note = 2'-fluoro cytidine
  modified_base 16: mod_base = OTHER; note = 2'O-methyl uridine
  modified_base 17: mod_base = OTHER; note = 2'-fluoro guanosine
  modified_base 18: mod_base = OTHER; note = 2'O-methyl adenosine
  modified_base 19: mod_base = OTHER; note = 2'-fluoro cytidine
  modified_base 20: mod_base = OTHER; note = 2'O-methyl uridine phosphorothioate
  modified_base 21: mod_base = OTHER; note = 2'-fluoro uridine
aaacgttctggtgtctgactt

SEQ ID NO: 1432 - RNA, 21 nt, synthetic construct
  source 1..21: mol_type = other RNA
  modified_base 1: mod_base = OTHER; note = 2'-fluoro adenosine phosphorothioate
  modified_base 2: mod_base = OTHER; note = 2'O-methyl adenosine phosphorothioate
  modified_base 3: mod_base = OTHER; note = 2'-fluoro cytidine
  modified_base 4: mod_base = OTHER; note = 2'O-methyl guanosine
  modified_base 5: mod_base = OTHER; note = 2'-fluoro uridine
  modified_base 6: mod_base = OTHER; note = 2'O-methyl uridine
  modified_base 7: mod_base = OTHER; note = 2'-fluoro cytidine
  modified_base 8: mod_base = OTHER; note = 2'O-methyl uridine
  modified_base 9: mod_base = OTHER; note = 2'-fluoro guanosine
  modified_base 10: mod_base = OTHER; note = 2'O-methyl guanosine
  modified_base 11: mod_base = OTHER; note = 2'-fluoro uridine
  modified_base 12: mod_base = OTHER; note = 2'O-methyl guanosine
  modified_base 13: mod_base = OTHER; note = 2'-fluoro uridine
  modified_base 14: mod_base = OTHER; note = 2'O-methyl cytidine
  modified_base 15: mod_base = OTHER; note = 2'-fluoro uridine
  modified_base 16: mod_base = OTHER; note = 2'O-methyl guanosine
  modified_base 17: mod_base = OTHER; note = 2'-fluoro adenosine
  modified_base 18: mod_base = OTHER; note = 2'O-methyl cytidine
  modified_base 19: mod_base = OTHER; note = 2'-fluoro uridine
  modified_base 20: mod_base = OTHER; note = 2'O-methyl uridine phosphorothioate
  modified_base 21: mod_base = OTHER; note = 2'-fluoro uridine
aacgttctggtgtctgacttt

SEQ ID NO: 1433 - RNA, 21 nt, synthetic construct
  source 1..21: mol_type = other RNA
  modified_base 1: mod_base = OTHER; note = 2'-fluoro adenosine phosphorothioate
  modified_base 2: mod_base = OTHER; note = 2'O-methyl cytidine phosphorothioate
  modified_base 3: mod_base = OTHER; note = 2'-fluoro guanosine
  modified_base 4: mod_base = OTHER; note = 2'O-methyl uridine
  modified_base 5: mod_base = OTHER; note = 2'-fluoro uridine
  modified_base 6: mod_base = OTHER; note = 2'O-methyl cytidine
  modified_base 7: mod_base = OTHER; note = 2'-fluoro uridine
  modified_base 8: mod_base = OTHER; note = 2'O-methyl guanosine
  modified_base 9: mod_base = OTHER; note = 2'-fluoro guanosine
  modified_base 10: mod_base = OTHER; note = 2'O-methyl uridine
  modified_base 11: mod_base = OTHER; note = 2'-fluoro guanosine
  modified_base 12: mod_base = OTHER; note = 2'O-methyl uridine
  modified_base 13: mod_base = OTHER; note = 2'-fluoro cytidine
  modified_base 14: mod_base = OTHER; note = 2'O-methyl uridine
  modified_base 15: mod_base = OTHER; note = 2'-fluoro guanosine
  modified_base 16: mod_base = OTHER; note = 2'O-methyl adenosine
  modified_base 17: mod_base = OTHER; note = 2'-fluoro cytidine
  modified_base 18: mod_base = OTHER; note = 2'O-methyl uridine
  modified_base 19: mod_base = OTHER; note = 2'-fluoro uridine
  modified_base 20: mod_base = OTHER; note = 2'O-methyl uridine phosphorothioate
  modified_base 21: mod_base = OTHER; note = 2'-fluoro cytidine
acgttctggtgtctgactttc

SEQ ID NO: 1434 - RNA, 21 nt, synthetic construct
  source 1..21: mol_type = other RNA
  modified_base 1: mod_base = OTHER; note = 2'-fluoro cytidine phosphorothioate
  modified_base 2: mod_base = OTHER; note = 2'O-methyl guanosine phosphorothioate
  modified_base 3: mod_base = OTHER; note = 2'-fluoro uridine
  modified_base 4: mod_base = OTHER; note = 2'O-methyl uridine
  modified_base 5: mod_base = OTHER; note = 2'-fluoro cytidine
  modified_base 6: mod_base = OTHER; note = 2'O-methyl uridine
  modified_base 7: mod_base = OTHER; note = 2'-fluoro guanosine
  modified_base 8: mod_base = OTHER; note = 2'O-methyl guanosine
  modified_base 9: mod_base = OTHER; note = 2'-fluoro uridine
  modified_base 10: mod_base = OTHER; note = 2'O-methyl guanosine
  modified_base 11: mod_base = OTHER; note = 2'-fluoro uridine
  modified_base 12: mod_base = OTHER; note = 2'O-methyl cytidine
  modified_base 13: mod_base = OTHER; note = 2'-fluoro uridine
  modified_base 14: mod_base = OTHER; note = 2'O-methyl guanosine
  modified_base 15: mod_base = OTHER; note = 2'-fluoro adenosine
  modified_base 16: mod_base = OTHER; note = 2'O-methyl cytidine
  modified_base 17: mod_base = OTHER; note = 2'-fluoro uridine
  modified_base 18: mod_base = OTHER; note = 2'O-methyl uridine
  modified_base 19: mod_base = OTHER; note = 2'-fluoro uridine
  modified_base 20: mod_base = OTHER; note = 2'O-methyl cytidine phosphorothioate
  modified_base 21: mod_base = OTHER; note = 2'-fluoro guanosine
cgttctggtgtctgactttcg

SEQ ID NO: 1435 - RNA, 21 nt, synthetic construct
  source 1..21: mol_type = other RNA
  modified_base 1: mod_base = OTHER; note = 2'-fluoro cytidine phosphorothioate
  modified_base 2: mod_base = OTHER; note = 2'O-methyl uridine phosphorothioate
  modified_base 3: mod_base = OTHER; note = 2'-fluoro guanosine
  modified_base 4: mod_base = OTHER; note = 2'O-methyl guanosine
  modified_base 5: mod_base = OTHER; note = 2'-fluoro uridine
  modified_base 6: mod_base = OTHER; note = 2'O-methyl guanosine
  modified_base 7: mod_base = OTHER; note = 2'-fluoro uridine
  modified_base 8: mod_base = OTHER; note = 2'O-methyl cytidine
  modified_base 9: mod_base = OTHER; note = 2'-fluoro uridine
  modified_base 10: mod_base = OTHER; note = 2'O-methyl guanosine
  modified_base 11: mod_base = OTHER; note = 2'-fluoro adenosine
  modified_base 12: mod_base = OTHER; note = 2'O-methyl cytidine
  modified_base 13: mod_base = OTHER; note = 2'-fluoro uridine
  modified_base 14: mod_base = OTHER; note = 2'O-methyl uridine
  modified_base 15: mod_base = OTHER; note = 2'-fluoro uridine
  modified_base 16: mod_base = OTHER; note = 2'O-methyl cytidine
  modified_base 17: mod_base = OTHER; note = 2'-fluoro guanosine
  modified_base 18: mod_base = OTHER; note = 2'O-methyl guanosine
  modified_base 19: mod_base = OTHER; note = 2'-fluoro uridine
  modified_base 20: mod_base = OTHER; note = 2'O-methyl cytidine phosphorothioate
  modified_base 21: mod_base = OTHER; note = 2'-fluoro cytidine
ctggtgtctgactttcggtcc

SEQ ID NO: 1436 - RNA, 21 nt, synthetic construct
  source 1..21: mol_type = other RNA
  modified_base 1: mod_base = OTHER; note = 2'-fluoro uridine phosphorothioate
  modified_base 2: mod_base = OTHER; note = 2'O-methyl guanosine phosphorothioate
  modified_base 3: mod_base = OTHER; note = 2'-fluoro guanosine
  modified_base 4: mod_base = OTHER; note = 2'O-methyl uridine
  modified_base 5: mod_base = OTHER; note = 2'-fluoro guanosine
  modified_base 6: mod_base = OTHER; note = 2'O-methyl uridine
  modified_base 7: mod_base = OTHER; note = 2'-fluoro cytidine
  modified_base 8: mod_base = OTHER; note = 2'O-methyl uridine
  modified_base 9: mod_base = OTHER; note = 2'-fluoro guanosine
  modified_base 10: mod_base = OTHER; note = 2'O-methyl adenosine
  modified_base 11: mod_base = OTHER; note = 2'-fluoro cytidine
  modified_base 12: mod_base = OTHER; note = 2'O-methyl uridine
  modified_base 13: mod_base = OTHER; note = 2'-fluoro uridine
  modified_base 14: mod_base = OTHER; note = 2'O-methyl uridine
  modified_base 15: mod_base = OTHER; note = 2'-fluoro cytidine
  modified_base 16: mod_base = OTHER; note = 2'O-methyl guanosine
  modified_base 17: mod_base = OTHER; note = 2'-fluoro guanosine
  modified_base 18: mod_base = OTHER; note = 2'O-methyl uridine
  modified_base 19: mod_base = OTHER; note = 2'-fluoro cytidine
  modified_base 20: mod_base = OTHER; note = 2'O-methyl cytidine phosphorothioate
  modified_base 21: mod_base = OTHER; note = 2'-fluoro adenosine
tggtgtctgactttcggtcca

SEQ ID NO: 1437 - RNA, 21 nt, synthetic construct
  source 1..21: mol_type = other RNA
  modified_base 1: mod_base = OTHER; note = 2'O-methyl uridine phosphorothioate
  modified_base 2: mod_base = OTHER; note = 2'O-methyl adenosine phosphorothioate
  modified_base 3: mod_base = OTHER; note = 2'O-methyl cytidine
  modified_base 4: mod_base = OTHER; note = 2'O-methyl cytidine
  modified_base 5: mod_base = OTHER; note = 2'O-methyl adenosine
  modified_base 6: mod_base = OTHER; note = 2'O-methyl guanosine
  modified_base 7: mod_base = OTHER; note = 2'-fluoro adenosine
  modified_base 8: mod_base = OTHER; note = 2'O-methyl guanosine
  modified_base 9: mod_base = OTHER; note = 2'-fluoro uridine
  modified_base 10: mod_base = OTHER; note = 2'-fluoro guanosine
  modified_base 11: mod_base = OTHER; note = 2'-fluoro uridine
  modified_base 12: mod_base = OTHER; note = 2'O-methyl cytidine
  modified_base 13: mod_base = OTHER; note = 2'O-methyl uridine
  modified_base 14: mod_base = OTHER; note = 2'O-methyl guanosine
  modified_base 15: mod_base = OTHER; note = 2'O-methyl adenosine
  modified_base 16: mod_base = OTHER; note = 2'O-methyl uridine
  modified_base 17: mod_base = OTHER; note = 2'O-methyl guanosine
  modified_base 18: mod_base = OTHER; note = 2'O-methyl guanosine
  modified_base 19: mod_base = OTHER; note = 2'O-methyl guanosine
  modified_base 20: mod_base = OTHER; note = 2'O-methyl guanosine phosphorothioate
  modified_base 21: mod_base = OTHER; note = 2'O-methyl adenosine
taccagagtgtctgatgggga

SEQ ID NO: 1438 - RNA, 21 nt, synthetic construct
  source 1..21: mol_type = other RNA
  modified_base 1: mod_base = OTHER; note = 2'O-methyl guanosine phosphorothioate
  modified_base 2: mod_base = OTHER; note = 2'O-methyl uridine phosphorothioate
  modified_base 3: mod_base = OTHER; note = 2'O-methyl guanosine
  modified_base 4: mod_base = OTHER; note = 2'O-methyl uridine
  modified_base 5: mod_base = OTHER; note = 2'O-methyl cytidine
  modified_base 6: mod_base = OTHER; note = 2'O-methyl uridine
  modified_base 7: mod_base = OTHER; note = 2'-fluoro guanosine
  modified_base 8: mod_base = OTHER; note = 2'O-methyl adenosine
  modified_base 9: mod_base = OTHER; note = 2'-fluoro cytidine
  modified_base 10: mod_base = OTHER; note = 2'-fluoro uridine
  modified_base 11: mod_base = OTHER; note = 2'-fluoro uridine
  modified_base 12: mod_base = OTHER; note = 2'O-methyl uridine
  modified_base 13: mod_base = OTHER; note = 2'O-methyl cytidine
  modified_base 14: mod_base = OTHER; note = 2'O-methyl guanosine
  modified_base 15: mod_base = OTHER; note = 2'O-methyl guanosine
  modified_base 16: mod_base = OTHER; note = 2'O-methyl uridine
  modified_base 17: mod_base = OTHER; note = 2'O-methyl cytidine
  modified_base 18: mod_base = OTHER; note = 2'O-methyl cytidine
  modified_base 19: mod_base = OTHER; note = 2'O-methyl adenosine
  modified_base 20: mod_base = OTHER; note = 2'O-methyl adenosine phosphorothioate
  modified_base 21: mod_base = OTHER; note = 2'O-methyl adenosine
gtgtctgactttcggtccaaa

SEQ ID NO: 1439 - RNA, 21 nt, synthetic construct
  source 1..21: mol_type = other RNA
  modified_base 1: mod_base = OTHER; note = 2'O-methyl uridine phosphorothioate
  modified_base 2: mod_base = OTHER; note = 2'O-methyl cytidine phosphorothioate
  modified_base 3: mod_base = OTHER; note = 2'O-methyl cytidine
  modified_base 4: mod_base = OTHER; note = 2'O-methyl adenosine
  modified_base 5: mod_base = OTHER; note = 2'O-methyl adenosine
  modified_base 6: mod_base = OTHER; note = 2'O-methyl adenosine
  modified_base 7: mod_base = OTHER; note = 2'-fluoro guanosine
  modified_base 8: mod_base = OTHER; note = 2'O-methyl adenosine
  modified_base 9: mod_base = OTHER; note = 2'-fluoro cytidine
  modified_base 10: mod_base = OTHER; note = 2'-fluoro guanosine
  modified_base 11: mod_base = OTHER; note = 2'-fluoro adenosine
  modified_base 12: mod_base = OTHER; note = 2'O-methyl adenosine
  modified_base 13: mod_base = OTHER; note = 2'O-methyl guanosine
  modified_base 14: mod_base = OTHER; note = 2'O-methyl uridine
  modified_base 15: mod_base = OTHER; note = 2'O-methyl cytidine
  modified_base 16: mod_base = OTHER; note = 2'O-methyl guanosine
  modified_base 17: mod_base = OTHER; note = 2'O-methyl uridine
  modified_base 18: mod_base = OTHER; note = 2'O-methyl guanosine
  modified_base 19: mod_base = OTHER; note = 2'O-methyl guanosine
  modified_base 20: mod_base = OTHER; note = 2'O-methyl adenosine phosphorothioate
  modified_base 21: mod_base = OTHER; note = 2'O-methyl uridine
tccaaagacgaagtcgtggat

SEQ ID NO: 1440 - RNA, 21 nt, synthetic construct
  source 1..21: mol_type = other RNA
  modified_base 1: mod_base = OTHER; note = 2'O-methyl guanosine phosphorothioate
  modified_base 2: mod_base = OTHER; note = 2'O-methyl adenosine phosphorothioate
  modified_base 3: mod_base = OTHER; note = 2'O-methyl adenosine
  modified_base 4: mod_base = OTHER; note = 2'O-methyl guanosine
  modified_base 5: mod_base = OTHER; note = 2'O-methyl uridine
  modified_base 6: mod_base = OTHER; note = 2'O-methyl cytidine
  modified_base 7: mod_base = OTHER; note = 2'-fluoro guanosine
  modified_base 8: mod_base = OTHER; note = 2'O-methyl uridine
  modified_base 9: mod_base = OTHER; note = 2'-fluoro guanosine
  modified_base 10: mod_base = OTHER; note = 2'-fluoro guanosine
  modified_base 11: mod_base = OTHER; note = 2'-fluoro adenosine
  modified_base 12: mod_base = OTHER; note = 2'O-methyl uridine
  modified_base 13: mod_base = OTHER; note = 2'O-methyl guanosine
  modified_base 14: mod_base = OTHER; note = 2'O-methyl cytidine
  modified_base 15: mod_base = OTHER; note = 2'O-methyl cytidine
  modified_base 16: mod_base = OTHER; note = 2'O-methyl uridine
  modified_base 17: mod_base = OTHER; note = 2'O-methyl uridine
  modified_base 18: mod_base = OTHER; note = 2'O-methyl guanosine
  modified_base 19: mod_base = OTHER; note = 2'O-methyl guanosine
  modified_base 20: mod_base = OTHER; note = 2'O-methyl uridine phosphorothioate
  modified_base 21: mod_base = OTHER; note = 2'O-methyl adenosine
gaagtcgtggatgccttggta

SEQ ID NO: 1441 - RNA, 21 nt, synthetic construct
  source 1..21: mol_type = other RNA
  modified_base 1: mod_base = OTHER; note = 2'O-methyl guanosine phosphorothioate
  modified_base 2: mod_base = OTHER; note = 2'O-methyl uridine phosphorothioate
  modified_base 3: mod_base = OTHER; note = 2'O-methyl cytidine
  modified_base 4: mod_base = OTHER; note = 2'O-methyl guanosine
  modified_base 5: mod_base = OTHER; note = 2'O-methyl uridine
  modified_base 6: mod_base = OTHER; note = 2'O-methyl guanosine
  modified_base 7: mod_base = OTHER; note = 2'-fluoro guanosine
  modified_base 8: mod_base = OTHER; note = 2'O-methyl adenosine
  modified_base 9: mod_base = OTHER; note = 2'-fluoro uridine
  modified_base 10: mod_base = OTHER; note = 2'-fluoro guanosine
  modified_base 11: mod_base = OTHER; note = 2'-fluoro cytidine
  modified_base 12: mod_base = OTHER; note = 2'O-methyl cytidine
  modified_base 13: mod_base = OTHER; note = 2'O-methyl uridine
  modified_base 14: mod_base = OTHER; note = 2'O-methyl uridine
  modified_base 15: mod_base = OTHER; note = 2'O-methyl guanosine
  modified_base 16: mod_base = OTHER; note = 2'O-methyl guanosine
  modified_base 17: mod_base = OTHER; note = 2'O-methyl uridine
  modified_base 18: mod_base = OTHER; note = 2'O-methyl adenosine
  modified_base 19: mod_base = OTHER; note = 2'O-methyl uridine
  modified_base 20: mod_base = OTHER; note = 2'O-methyl guanosine phosphorothioate
  modified_base 21: mod_base = OTHER; note = 2'O-methyl uridine
gtcgtggatgccttggtatgt

SEQ ID NO: 1442 - RNA, 21 nt, synthetic construct
  source 1..21: mol_type = other RNA
  modified_base 1: mod_base = OTHER; note = 2'O-methyl uridine phosphorothioate
  modified_base 2: mod_base = OTHER; note = 2'O-methyl cytidine phosphorothioate
  modified_base 3: mod_base = OTHER; note = 2'O-methyl guanosine
  modified_base 4: mod_base = OTHER; note = 2'O-methyl uridine
  modified_base 5: mod_base = OTHER; note = 2'O-methyl guanosine
  modified_base 6: mod_base = OTHER; note = 2'O-methyl guanosine
  modified_base 7: mod_base = OTHER; note = 2'-fluoro adenosine
  modified_base 8: mod_base = OTHER; note = 2'O-methyl uridine
  modified_base 9: mod_base = OTHER; note = 2'-fluoro guanosine
  modified_base 10: mod_base = OTHER; note = 2'-fluoro cytidine
  modified_base 11: mod_base = OTHER; note = 2'-fluoro cytidine
  modified_base 12: mod_base = OTHER; note = 2'O-methyl uridine
  modified_base 13: mod_base = OTHER; note = 2'O-methyl uridine
  modified_base 14: mod_base = OTHER; note = 2'O-methyl guanosine
  modified_base 15: mod_base = OTHER; note = 2'O-methyl guanosine
  modified_base 16: mod_base = OTHER; note = 2'O-methyl uridine
  modified_base 17: mod_base = OTHER; note = 2'O-methyl adenosine
  modified_base 18: mod_base = OTHER; note = 2'O-methyl uridine
  modified_base 19: mod_base = OTHER; note = 2'O-methyl guanosine
  modified_base 20: mod_base = OTHER; note = 2'O-methyl uridine phosphorothioate
  modified_base 21: mod_base = OTHER; note = 2'O-methyl uridine
tcgtggatgccttggtatgtt

SEQ ID NO: 1443 - RNA, 21 nt, synthetic construct
  source 1..21: mol_type = other RNA
  modified_base 1: mod_base = OTHER; note = 2'O-methyl guanosine phosphorothioate
  modified_base 2: mod_base = OTHER; note = 2'O-methyl cytidine phosphorothioate
  modified_base 3: mod_base = OTHER; note = 2'O-methyl cytidine
  modified_base 4: mod_base = OTHER; note = 2'O-methyl uridine
  modified_base 5: mod_base = OTHER; note = 2'O-methyl uridine
  modified_base 6: mod_base = OTHER; note = 2'O-methyl guanosine
  modified_base 7: mod_base = OTHER; note = 2'-fluoro guanosine
  modified_base 8: mod_base = OTHER; note = 2'O-methyl uridine
  modified_base 9: mod_base = OTHER; note = 2'-fluoro adenosine
  modified_base 10: mod_base = OTHER; note = 2'-fluoro uridine
  modified_base 11: mod_base = OTHER; note = 2'-fluoro guanosine
  modified_base 12: mod_base = OTHER; note = 2'O-methyl uridine
  modified_base 13: mod_base = OTHER; note = 2'O-methyl uridine
  modified_base 14: mod_base = OTHER; note = 2'O-methyl cytidine
  modified_base 15: mod_base = OTHER; note = 2'O-methyl cytidine
  modified_base 16: mod_base = OTHER; note = 2'O-methyl uridine
  modified_base 17: mod_base = OTHER; note = 2'O-methyl guanosine
  modified_base 18: mod_base = OTHER; note = 2'O-methyl cytidine
  modified_base 19: mod_base = OTHER; note = 2'O-methyl uridine
  modified_base 20: mod_base = OTHER; note = 2'O-methyl uridine phosphorothioate
  modified_base 21: mod_base = OTHER; note = 2'O-methyl cytidine
gccttggtatgttcctgcttc

SEQ ID NO: 1444 - RNA, 21 nt, synthetic construct
  source 1..21: mol_type = other RNA
  modified_base 1: mod_base = OTHER; note = 2'O-methyl adenosine phosphorothioate
  modified_base 2: mod_base = OTHER; note = 2'O-methyl uridine phosphorothioate
  modified_base 3: mod_base = OTHER; note = 2'O-methyl guanosine
  modified_base 4: mod_base = OTHER; note = 2'O-methyl cytidine
  modified_base 5: mod_base = OTHER; note = 2'O-methyl cytidine
  modified_base 6: mod_base = OTHER; note = 2'O-methyl adenosine
  modified_base 7: mod_base = OTHER; note = 2'-fluoro adenosine
  modified_base 8: mod_base = OTHER; note = 2'O-methyl adenosine
  modified_base 9: mod_base = OTHER; note = 2'-fluoro adenosine
  modified_base 10: mod_base = OTHER; note = 2'-fluoro cytidine
  modified_base 11: mod_base = OTHER; note = 2'-fluoro adenosine
  modified_base 12: mod_base = OTHER; note = 2'O-methyl adenosine
  modified_base 13: mod_base = OTHER; note = 2'O-methyl cytidine
  modified_base 14: mod_base = OTHER; note = 2'O-methyl cytidine
  modified_base 15: mod_base = OTHER; note = 2'O-methyl adenosine
  modified_base 16: mod_base = OTHER; note = 2'O-methyl uridine
  modified_base 17: mod_base = OTHER; note = 2'O-methyl cytidine
  modified_base 18: mod_base = OTHER; note = 2'O-methyl adenosine
  modified_base 19: mod_base = OTHER; note = 2'O-methyl cytidine
  modified_base 20: mod_base = OTHER; note = 2'O-methyl cytidine phosphorothioate
  modified_base 21: mod_base = OTHER; note = 2'O-methyl guanosine
atgccaaaacaaccatcaccg

SEQ ID NO: 1445 - RNA, 21 nt, synthetic construct
  source 1..21: mol_type = other RNA
  modified_base 1: mod_base = OTHER; note = 2'O-methyl cytidine phosphorothioate
  modified_base 2: mod_base = OTHER; note = 2'O-methyl cytidine phosphorothioate
  modified_base 3: mod_base = OTHER; note = 2'O-methyl adenosine
  modified_base 4: mod_base = OTHER; note = 2'O-methyl adenosine
  modified_base 5: mod_base = OTHER; note = 2'O-methyl adenosine
  modified_base 6: mod_base = OTHER; note = 2'O-methyl adenosine
  modified_base 7: mod_base = OTHER; note = 2'-fluoro cytidine
  modified_base 8: mod_base = OTHER; note = 2'O-methyl adenosine
  modified_base 9: mod_base = OTHER; note = 2'-fluoro adenosine
  modified_base 10: mod_base = OTHER; note = 2'-fluoro cytidine
  modified_base 11: mod_base = OTHER; note = 2'-fluoro cytidine
  modified_base 12: mod_base = OTHER; note = 2'O-methyl adenosine
  modified_base 13: mod_base = OTHER; note = 2'O-methyl uridine
  modified_base 14: mod_base = OTHER; note = 2'O-methyl cytidine
  modified_base 15: mod_base = OTHER; note = 2'O-methyl adenosine
  modified_base 16: mod_base = OTHER; note = 2'O-methyl cytidine
  modified_base 17: mod_base = OTHER; note = 2'O-methyl cytidine
  modified_base 18: mod_base = OTHER; note = 2'O-methyl guanosine
  modified_base 19: mod_base = OTHER; note = 2'O-methyl uridine
  modified_base 20: mod_base = OTHER; note = 2'O-methyl guanosine phosphorothioate
  modified_base 21: mod_base = OTHER; note = 2'O-methyl uridine
ccaaaacaaccatcaccgtgt

SEQ ID NO: 1446 - RNA, 21 nt, synthetic construct
  source 1..21: mol_type = other RNA
  modified_base 1: mod_base = OTHER; note = 2'O-methyl cytidine phosphorothioate
  modified_base 2: mod_base = OTHER; note = 2'O-methyl guanosine phosphorothioate
  modified_base 3: mod_base = OTHER; note = 2'O-methyl adenosine
  modified_base 4: mod_base = OTHER; note = 2'O-methyl cytidine
  modified_base 5: mod_base = OTHER; note = 2'O-methyl adenosine
  modified_base 6: mod_base = OTHER; note = 2'O-methyl uridine
  modified_base 7: mod_base = OTHER; note = 2'-fluoro cytidine
  modified_base 8: mod_base = OTHER; note = 2'O-methyl uridine
  modified_base 9: mod_base = OTHER; note = 2'-fluoro guanosine
  modified_base 10: mod_base = OTHER; note = 2'-fluoro cytidine
  modified_base 11: mod_base = OTHER; note = 2'-fluoro cytidine
  modified_base 12: mod_base = OTHER; note = 2'O-methyl cytidine
  modified_base 13: mod_base = OTHER; note = 2'O-methyl uridine
  modified_base 14: mod_base = OTHER; note = 2'O-methyl adenosine
  modified_base 15: mod_base = OTHER; note = 2'O-methyl adenosine
  modified_base 16: mod_base = OTHER; note = 2'O-methyl adenosine
  modified_base 17: mod_base = OTHER; note = 2'O-methyl guanosine
  modified_base 18: mod_base = OTHER; note = 2'O-methyl uridine
  modified_base 19: mod_base = OTHER; note = 2'O-methyl cytidine
  modified_base 20: mod_base = OTHER; note = 2'O-methyl adenosine phosphorothioate
  modified_base 21: mod_base = OTHER; note = 2'O-methyl adenosine
cgacatctgccctaaagtcaa

SEQ ID NO: 1447 - RNA, 21 nt, synthetic construct
  source 1..21: mol_type = other RNA
  modified_base 1: mod_base = OTHER; note = 2'O-methyl adenosine phosphorothioate
  modified_base 2: mod_base = OTHER; note = 2'O-methyl uridine phosphorothioate
  modified_base 3: mod_base = OTHER; note = 2'O-methyl cytidine
  modified_base 4: mod_base = OTHER; note = 2'O-methyl adenosine
  modified_base 5: mod_base = OTHER; note = 2'O-methyl cytidine
  modified_base 6: mod_base = OTHER; note = 2'O-methyl cytidine
  modified_base 7: mod_base = OTHER; note = 2'-fluoro adenosine
  modified_base 8: mod_base = OTHER; note = 2'O-methyl adenosine
  modified_base 9: mod_base = OTHER; note = 2'-fluoro guanosine
  modified_base 10: mod_base = OTHER; note = 2'-fluoro cytidine
  modified_base 11: mod_base = OTHER; note = 2'-fluoro uridine
  modified_base 12: mod_base = OTHER; note = 2'O-methyl cytidine
  modified_base 13: mod_base = OTHER; note = 2'O-methyl adenosine
  modified_base 14: mod_base = OTHER; note = 2'O-methyl guanosine
  modified_base 15: mod_base = OTHER; note = 2'O-methyl uridine
  modified_base 16: mod_base = OTHER; note = 2'O-methyl cytidine
  modified_base 17: mod_base = OTHER; note = 2'O-methyl uridine
  modified_base 18: mod_base = OTHER; note = 2'O-methyl adenosine
  modified_base 19: mod_base = OTHER; note = 2'O-methyl cytidine
  modified_base 20: mod_base = OTHER; note = 2'O-methyl guanosine phosphorothioate
  modified_base 21: mod_base = OTHER; note = 2'O-methyl cytidine
atcaccaagctcagtctacgc

SEQ ID NO: 1448 - RNA, 21 nt, synthetic construct
  source 1..21: mol_type = other RNA
  modified_base 1: mod_base = OTHER; note = 2'O-methyl cytidine phosphorothioate
  modified_base 2: mod_base = OTHER; note = 2'O-methyl cytidine phosphorothioate
  modified_base 3: mod_base = OTHER; note = 2'O-methyl cytidine
  modified_base 4: mod_base = OTHER; note = 2'O-methyl adenosine
  modified_base 5: mod_base = OTHER; note = 2'O-methyl uridine
  modified_base 6: mod_base = OTHER; note = 2'O-methyl uridine
  modified_base 7: mod_base = OTHER; note = 2'-fluoro adenosine
  modified_base 8: mod_base = OTHER; note = 2'O-methyl guanosine
  modified_base 9: mod_base = OTHER; note = 2'-fluoro guanosine
  modified_base 10: mod_base = OTHER; note = 2'-fluoro adenosine
  modified_base 11: mod_base = OTHER; note = 2'-fluoro uridine
  modified_base 12: mod_base = OTHER; note = 2'O-methyl adenosine
  modified_base 13: mod_base = OTHER; note = 2'O-methyl adenosine
  modified_base 14: mod_base = OTHER; note = 2'O-methyl uridine
  modified_base 15: mod_base = OTHER; note = 2'O-methyl guanosine
  modified_base 16: mod_base = OTHER; note = 2'O-methyl uridine
  modified_base 17: mod_base = OTHER; note = 2'O-methyl cytidine
  modified_base 18: mod_base = OTHER; note = 2'O-methyl uridine
  modified_base 19: mod_base = OTHER; note = 2'O-methyl uridine
  modified_base 20: mod_base = OTHER; note = 2'O-methyl adenosine phosphorothioate
  modified_base 21: mod_base = OTHER; note = 2'O-methyl uridine
cccattaggataatgtcttat

SEQ ID NO: 1449 - RNA, 21 nt, synthetic construct
  source 1..21: mol_type = other RNA
  modified_base 1: mod_base = OTHER; note = 2'O-methyl uridine phosphorothioate
  modified_base 2: mod_base = OTHER; note = 2'O-methyl adenosine phosphorothioate
  modified_base 3: mod_base = OTHER; note = 2'O-methyl cytidine
  modified_base 4: mod_base = OTHER; note = 2'O-methyl cytidine
  modified_base 5: mod_base = OTHER; note = 2'O-methyl adenosine
  modified_base 6: mod_base = OTHER; note = 2'O-methyl guanosine
  modified_base 7: mod_base = OTHER; note = 2'-fluoro adenosine
  modified_base 8: mod_base = OTHER; note = 2'O-methyl guanosine
  modified_base 9: mod_base = OTHER; note = 2'-fluoro uridine
  modified_base 10: mod_base = OTHER; note = 2'-fluoro guanosine
  modified_base 11: mod_base = OTHER; note = 2'-fluoro uridine
  modified_base 12: mod_base = OTHER; note = 2'O-methyl cytidine
  modified_base 13: mod_base = OTHER; note = 2'O-methyl uridine
  modified_base 14: mod_base = OTHER; note = 2'O-methyl guanosine
  modified_base 15: mod_base = OTHER; note = 2'O-methyl adenosine
  modified_base 16: mod_base = OTHER; note = 2'O-methyl uridine
  modified_base 17: mod_base = OTHER; note = 2'O-methyl guanosine
  modified_base 18: mod_base = OTHER; note = 2'O-methyl guanosine
  modified_base 19: mod_base = OTHER; note = 2'O-methyl guanosine
  modified_base 20: mod_base = OTHER; note = 2'O-methyl guanosine phosphorothioate
  modified_base 21: mod_base = OTHER; note = 2'O-methyl adenosine
taccagagtgtctgatgggga

SEQ ID NO: 1450 - RNA, 21 nt, synthetic construct
  source 1..21: mol_type = other RNA
  modified_base 1: mod_base = OTHER; note = 2'O-methyl guanosine phosphorothioate
  modified_base 2: mod_base = OTHER; note = 2'O-methyl uridine phosphorothioate
  modified_base 3: mod_base = OTHER; note = 2'O-methyl guanosine
  modified_base 4: mod_base = OTHER; note = 2'O-methyl uridine
  modified_base 5: mod_base = OTHER; note = 2'O-methyl cytidine
  modified_base 6: mod_base = OTHER; note = 2'O-methyl uridine
  modified_base 7: mod_base = OTHER; note = 2'-fluoro guanosine
  modified_base 8: mod_base = OTHER; note = 2'O-methyl adenosine
  modified_base 9: mod_base = OTHER; note = 2'-fluoro cytidine
  modified_base 10: mod_base = OTHER; note = 2'-fluoro uridine
  modified_base 11: mod_base = OTHER; note = 2'-fluoro uridine
  modified_base 12: mod_base = OTHER; note = 2'O-methyl uridine
  modified_base 13: mod_base = OTHER; note = 2'O-methyl cytidine
  modified_base 14: mod_base = OTHER; note = 2'O-methyl guanosine
  modified_base 15: mod_base = OTHER; note = 2'O-methyl guanosine
  modified_base 16: mod_base = OTHER; note = 2'O-methyl uridine
  modified_base 17: mod_base = OTHER; note = 2'O-methyl cytidine
  modified_base 18: mod_base = OTHER; note = 2'O-methyl cytidine
  modified_base 19: mod_base = OTHER; note = 2'O-methyl adenosine
  modified_base 20: mod_base = OTHER; note = 2'O-methyl adenosine phosphorothioate
  modified_base 21: mod_base = OTHER; note = 2'O-methyl adenosine
gtgtctgactttcggtccaaa

SEQ ID NO: 1451 - RNA, 21 nt, synthetic construct
  source 1..21: mol_type = other RNA
  modified_base 1: mod_base = OTHER; note = 2'O-methyl uridine phosphorothioate
  modified_base 2: mod_base = OTHER; note = 2'O-methyl cytidine phosphorothioate
  modified_base 3: mod_base = OTHER; note = 2'O-methyl cytidine
  modified_base 4: mod_base = OTHER; note = 2'O-methyl adenosine
  modified_base 5: mod_base = OTHER; note = 2'O-methyl adenosine
  modified_base 6: mod_base = OTHER; note = 2'O-methyl adenosine
  modified_base 7: mod_base = OTHER; note = 2'-fluoro guanosine
  modified_base 8: mod_base = OTHER; note = 2'O-methyl adenosine
  modified_base 9: mod_base = OTHER; note = 2'-fluoro cytidine
  modified_base 10: mod_base = OTHER; note = 2'-fluoro guanosine
  modified_base 11: mod_base = OTHER; note = 2'-fluoro adenosine
  modified_base 12: mod_base = OTHER; note = 2'O-methyl adenosine
  modified_base 13: mod_base = OTHER; note = 2'O-methyl guanosine
  modified_base 14: mod_base = OTHER; note = 2'O-methyl uridine
  modified_base 15: mod_base = OTHER; note = 2'O-methyl cytidine
  modified_base 16: mod_base = OTHER; note = 2'O-methyl guanosine
  modified_base 17: mod_base = OTHER; note = 2'O-methyl uridine
  modified_base 18: mod_base = OTHER; note = 2'O-methyl guanosine
  modified_base 19: mod_base = OTHER; note = 2'O-methyl guanosine
  modified_base 20: mod_base = OTHER; note = 2'O-methyl adenosine phosphorothioate
  modified_base 21: mod_base = OTHER; note = 2'O-methyl uridine
tccaaagacgaagtcgtggat

SEQ ID NO: 1452 - RNA, 21 nt, synthetic construct
  source 1..21: mol_type = other RNA
  modified_base 1: mod_base = OTHER; note = 2'O-methyl guanosine phosphorothioate
  modified_base 2: mod_base = OTHER; note = 2'O-methyl adenosine phosphorothioate
  modified_base 3: mod_base = OTHER; note = 2'O-methyl adenosine
  modified_base 4: mod_base = OTHER; note = 2'O-methyl guanosine
  modified_base 5: mod_base = OTHER; note = 2'O-methyl uridine
  modified_base 6: mod_base = OTHER; note = 2'O-methyl cytidine
  modified_base 7: mod_base = OTHER; note = 2'-fluoro guanosine
  modified_base 8: mod_base = OTHER; note = 2'O-methyl uridine
  modified_base 9: mod_base = OTHER; note = 2'-fluoro guanosine
  modified_base 10: mod_base = OTHER; note = 2'-fluoro guanosine
  modified_base 11: mod_base = OTHER; note = 2'-fluoro adenosine
  modified_base 12: mod_base = OTHER; note = 2'O-methyl uridine
  modified_base 13: mod_base = OTHER; note = 2'O-methyl guanosine
  modified_base 14: mod_base = OTHER; note = 2'O-methyl cytidine
  modified_base 15: mod_base = OTHER; note = 2'O-methyl cytidine
  modified_base 16: mod_base = OTHER; note = 2'O-methyl uridine
  modified_base 17: mod_base = OTHER; note = 2'O-methyl uridine
  modified_base 18: mod_base = OTHER; note = 2'O-methyl guanosine
  modified_base 19: mod_base = OTHER; note = 2'O-methyl guanosine
  modified_base 20: mod_base = OTHER; note = 2'O-methyl uridine phosphorothioate
  modified_base 21: mod_base = OTHER; note = 2'O-methyl adenosine
gaagtcgtggatgccttggta

SEQ ID NO: 1453 - RNA, 21 nt, synthetic construct
  source 1..21: mol_type = other RNA
  modified_base 1: mod_base = OTHER; note = 2'O-methyl guanosine phosphorothioate
  modified_base 2: mod_base = OTHER; note = 2'O-methyl uridine phosphorothioate
  modified_base 3: mod_base = OTHER; note = 2'O-methyl cytidine
  modified_base 4: mod_base = OTHER; note = 2'O-methyl guanosine
  modified_base 5: mod_base = OTHER; note = 2'O-methyl uridine
  modified_base 6: mod_base = OTHER; note = 2'O-methyl guanosine
  modified_base 7: mod_base = OTHER; note = 2'-fluoro guanosine
  modified_base 8: mod_base = OTHER; note = 2'O-methyl adenosine
  modified_base 9: mod_base = OTHER; note = 2'-fluoro uridine
  modified_base 10: mod_base = OTHER; note = 2'-fluoro guanosine
  modified_base 11: mod_base = OTHER; note = 2'-fluoro cytidine
  modified_base 12: mod_base = OTHER; note = 2'O-methyl cytidine
  modified_base 13: mod_base = OTHER; note = 2'O-methyl uridine
  modified_base 14: mod_base = OTHER; note = 2'O-methyl uridine
  modified_base 15: mod_base = OTHER; note = 2'O-methyl guanosine
  modified_base 16: mod_base = OTHER; note = 2'O-methyl guanosine
  modified_base 17: mod_base = OTHER; note = 2'O-methyl uridine
  modified_base 18: mod_base = OTHER; note = 2'O-methyl adenosine
  modified_base 19: mod_base = OTHER; note = 2'O-methyl uridine
  modified_base 20: mod_base = OTHER; note = 2'O-methyl guanosine phosphorothioate
  modified_base 21: mod_base = OTHER; note = 2'O-methyl uridine
gtcgtggatgccttggtatgt

SEQ ID NO: 1454 - RNA, 21 nt, synthetic construct
  source 1..21: mol_type = other RNA
  modified_base 1: mod_base = OTHER; note = 2'O-methyl uridine phosphorothioate
  modified_base 2: mod_base = OTHER; note = 2'O-methyl cytidine phosphorothioate
  modified_base 3: mod_base = OTHER; note = 2'O-methyl guanosine
  modified_base 4: mod_base = OTHER; note = 2'O-methyl uridine
  modified_base 5: mod_base = OTHER; note = 2'O-methyl guanosine
  modified_base 6: mod_base = OTHER; note = 2'O-methyl guanosine
  modified_base 7: mod_base = OTHER; note = 2'-fluoro adenosine
  modified_base 8: mod_base = OTHER; note = 2'O-methyl uridine
  modified_base 9: mod_base = OTHER; note = 2'-fluoro guanosine
  modified_base 10: mod_base = OTHER; note = 2'-fluoro cytidine
  modified_base 11: mod_base = OTHER; note = 2'-fluoro cytidine
  modified_base 12: mod_base = OTHER; note = 2'O-methyl uridine
  modified_base 13: mod_base = OTHER; note = 2'O-methyl uridine
  modified_base 14: mod_base = OTHER; note = 2'O-methyl guanosine
  modified_base 15: mod_base = OTHER; note = 2'O-methyl guanosine
  modified_base 16: mod_base = OTHER; note = 2'O-methyl uridine
  modified_base 17: mod_base = OTHER; note = 2'O-methyl adenosine
  modified_base 18: mod_base = OTHER; note = 2'O-methyl uridine
  modified_base 19: mod_base = OTHER; note = 2'O-methyl guanosine
  modified_base 20: mod_base = OTHER; note = 2'O-methyl uridine phosphorothioate
  modified_base 21: mod_base = OTHER; note = 2'O-methyl uridine
tcgtggatgccttggtatgtt

SEQ ID NO: 1455 - RNA, 21 nt, synthetic construct
  source 1..21: mol_type = other RNA
  modified_base 1: mod_base = OTHER; note = 2'O-methyl guanosine phosphorothioate
  modified_base 2: mod_base = OTHER; note = 2'O-methyl cytidine phosphorothioate
  modified_base 3: mod_base = OTHER; note = 2'O-methyl cytidine
  modified_base 4: mod_base = OTHER; note = 2'O-methyl uridine
  modified_base 5: mod_base = OTHER; note = 2'O-methyl uridine
  modified_base 6: mod_base = OTHER; note = 2'O-methyl guanosine
  modified_base 7: mod_base = OTHER; note = 2'-fluoro guanosine
  modified_base 8: mod_base = OTHER; note = 2'O-methyl uridine
  modified_base 9: mod_base = OTHER; note = 2'-fluoro adenosine
  modified_base 10: mod_base = OTHER; note = 2'-fluoro uridine
  modified_base 11: mod_base = OTHER; note = 2'-fluoro guanosine
  modified_base 12: mod_base = OTHER; note = 2'O-methyl uridine
  modified_base 13: mod_base = OTHER; note = 2'O-methyl uridine
  modified_base 14: mod_base = OTHER; note = 2'O-methyl cytidine
  modified_base 15: mod_base = OTHER; note = 2'O-methyl cytidine
  modified_base 16: mod_base = OTHER; note = 2'O-methyl uridine
  modified_base 17: mod_base = OTHER; note = 2'O-methyl guanosine
  modified_base 18: mod_base = OTHER; note = 2'O-methyl cytidine
  modified_base 19: mod_base = OTHER; note = 2'O-methyl uridine
  modified_base 20: mod_base = OTHER; note = 2'O-methyl uridine phosphorothioate
  modified_base 21: mod_base = OTHER; note = 2'O-methyl cytidine
gccttggtatgttcctgcttc

SEQ ID NO: 1456 - RNA, 21 nt, synthetic construct
  source 1..21: mol_type = other RNA
  modified_base 1: mod_base = OTHER; note = 2'O-methyl adenosine phosphorothioate
  modified_base 2: mod_base = OTHER; note = 2'O-methyl uridine phosphorothioate
  modified_base 3: mod_base = OTHER; note = 2'O-methyl guanosine
  modified_base 4: mod_base = OTHER; note = 2'O-methyl cytidine
  modified_base 5: mod_base = OTHER; note = 2'O-methyl cytidine
  modified_base 6: mod_base = OTHER; note = 2'O-methyl adenosine
  modified_base 7: mod_base = OTHER; note = 2'-fluoro adenosine
  modified_base 8: mod_base = OTHER; note = 2'O-methyl adenosine
  modified_base 9: mod_base = OTHER; note = 2'-fluoro adenosine
  modified_base 10: mod_base = OTHER; note = 2'-fluoro cytidine
  modified_base 11: mod_base = OTHER; note = 2'-fluoro adenosine
  modified_base 12: mod_base = OTHER; note = 2'O-methyl adenosine
  modified_base 13: mod_base = OTHER; note = 2'O-methyl cytidine
  modified_base 14: mod_base = OTHER; note = 2'O-methyl cytidine
  modified_base 15: mod_base = OTHER; note = 2'O-methyl adenosine
  modified_base 16: mod_base = OTHER; note = 2'O-methyl uridine
  modified_base 17: mod_base = OTHER; note = 2'O-methyl cytidine
  modified_base 18: mod_base = OTHER; note = 2'O-methyl adenosine
  modified_base 19: mod_base = OTHER; note = 2'O-methyl cytidine
  modified_base 20: mod_base = OTHER; note = 2'O-methyl cytidine phosphorothioate
  modified_base 21: mod_base = OTHER; note = 2'O-methyl guanosine
atgccaaaacaaccatcaccg

SEQ ID NO: 1457 - RNA, 21 nt, synthetic construct
  source 1..21: mol_type = other RNA
  modified_base 1: mod_base = OTHER; note = 2'O-methyl cytidine phosphorothioate
  modified_base 2: mod_base = OTHER; note = 2'O-methyl cytidine phosphorothioate
  modified_base 3: mod_base = OTHER; note = 2'O-methyl adenosine
  modified_base 4: mod_base = OTHER; note = 2'O-methyl adenosine
  modified_base 5: mod_base = OTHER; note = 2'O-methyl adenosine
  modified_base 6: mod_base = OTHER; note = 2'O-methyl adenosine
  modified_base 7: mod_base = OTHER; note = 2'-fluoro cytidine
  modified_base 8: mod_base = OTHER; note = 2'O-methyl adenosine
  modified_base 9: mod_base = OTHER; note = 2'-fluoro adenosine
  modified_base 10: mod_base = OTHER; note = 2'-fluoro cytidine
  modified_base 11: mod_base = OTHER; note = 2'-fluoro cytidine
  modified_base 12: mod_base = OTHER; note = 2'O-methyl adenosine
  modified_base 13: mod_base = OTHER; note = 2'O-methyl uridine
  modified_base 14: mod_base = OTHER; note = 2'O-methyl cytidine
  modified_base 15: mod_base = OTHER; note = 2'O-methyl adenosine
  modified_base 16: mod_base = OTHER; note = 2'O-methyl cytidine
  modified_base 17: mod_base = OTHER; note = 2'O-methyl cytidine
  modified_base 18: mod_base = OTHER; note = 2'O-methyl guanosine
  modified_base 19: mod_base = OTHER; note = 2'O-methyl uridine
  modified_base 20: mod_base = OTHER; note = 2'O-methyl guanosine phosphorothioate
  modified_base 21: mod_base = OTHER; note = 2'O-methyl uridine
ccaaaacaaccatcaccgtgt

SEQ ID NO: 1458 - RNA, 21 nt, synthetic construct
  source 1..21: mol_type = other RNA
  modified_base 1: mod_base = OTHER; note = 2'O-methyl cytidine phosphorothioate
  modified_base 2: mod_base = OTHER; note = 2'O-methyl guanosine phosphorothioate
  modified_base 3: mod_base = OTHER; note = 2'O-methyl adenosine
  modified_base 4: mod_base = OTHER; note = 2'O-methyl cytidine
  modified_base 5: mod_base = OTHER; note = 2'O-methyl adenosine
  modified_base 6: mod_base = OTHER; note = 2'O-methyl uridine
  modified_base 7: mod_base = OTHER; note = 2'-fluoro cytidine
  modified_base 8: mod_base = OTHER; note = 2'O-methyl uridine
  modified_base 9: mod_base = OTHER; note = 2'-fluoro guanosine
  modified_base 10: mod_base = OTHER; note = 2'-fluoro cytidine
  modified_base 11: mod_base = OTHER; note = 2'-fluoro cytidine
  modified_base 12: mod_base = OTHER; note = 2'O-methyl cytidine
  modified_base 13: mod_base = OTHER; note = 2'O-methyl uridine
  modified_base 14: mod_base = OTHER; note = 2'O-methyl adenosine
  modified_base 15: mod_base = OTHER; note = 2'O-methyl adenosine
  modified_base 16: mod_base = OTHER; note = 2'O-methyl adenosine
  modified_base 17: mod_base = OTHER; note = 2'O-methyl guanosine
  modified_base 18: mod_base = OTHER; note = 2'O-methyl uridine
  modified_base 19: mod_base = OTHER; note = 2'O-methyl cytidine
  modified_base 20: mod_base = OTHER; note = 2'O-methyl adenosine phosphorothioate
  modified_base 21: mod_base = OTHER; note = 2'O-methyl adenosine
cgacatctgccctaaagtcaa

SEQ ID NO: 1459 - RNA, 21 nt, synthetic construct
  source 1..21: mol_type = other RNA
  modified_base 1: mod_base = OTHER; note = 2'O-methyl adenosine phosphorothioate
  modified_base 2: mod_base = OTHER; note = 2'O-methyl uridine phosphorothioate
  modified_base 3: mod_base = OTHER; note = 2'O-methyl cytidine
  modified_base 4: mod_base = OTHER; note = 2'O-methyl adenosine
  modified_base 5: mod_base = OTHER; note = 2'O-methyl cytidine
  modified_base 6: mod_base = OTHER; note = 2'O-methyl cytidine
  modified_base 7: mod_base = OTHER; note = 2'-fluoro adenosine
  modified_base 8: mod_base = OTHER; note = 2'O-methyl adenosine
  modified_base 9: mod_base = OTHER; note = 2'-fluoro guanosine
  modified_base 10: mod_base = OTHER; note = 2'-fluoro cytidine
  modified_base 11: mod_base = OTHER; note = 2'-fluoro uridine
  modified_base 12: mod_base = OTHER; note = 2'O-methyl cytidine
  modified_base 13: mod_base = OTHER; note = 2'O-methyl adenosine
  modified_base 14: mod_base = OTHER; note = 2'O-methyl guanosine
  modified_base 15: mod_base = OTHER; note = 2'O-methyl uridine
  modified_base 16: mod_base = OTHER; note = 2'O-methyl cytidine
  modified_base 17: mod_base = OTHER; note = 2'O-methyl uridine
  modified_base 18: mod_base = OTHER; note = 2'O-methyl adenosine
  modified_base 19: mod_base = OTHER; note = 2'O-methyl cytidine
  modified_base 20: mod_base = OTHER; note = 2'O-methyl guanosine phosphorothioate
  modified_base 21: mod_base = OTHER; note = 2'O-methyl cytidine
atcaccaagctcagtctacgc

SEQ ID NO: 1460 - RNA, 21 nt, synthetic construct
  source 1..21: mol_type = other RNA
  modified_base 1: mod_base = OTHER; note = 2'O-methyl cytidine phosphorothioate
  modified_base 2: mod_base = OTHER; note = 2'O-methyl cytidine phosphorothioate
  modified_base 3: mod_base = OTHER; note = 2'O-methyl cytidine
  modified_base 4: mod_base = OTHER; note = 2'O-methyl adenosine
  modified_base 5: mod_base = OTHER; note = 2'O-methyl uridine
  modified_base 6: mod_base = OTHER; note = 2'O-methyl uridine
  modified_base 7: mod_base = OTHER; note = 2'-fluoro adenosine
  modified_base 8: mod_base = OTHER; note = 2'O-methyl guanosine
  modified_base 9: mod_base = OTHER; note = 2'-fluoro guanosine
  modified_base 10: mod_base = OTHER; note = 2'-fluoro adenosine
  modified_base 11: mod_base = OTHER; note = 2'-fluoro uridine
  modified_base 12: mod_base = OTHER; note = 2'O-methyl adenosine
  modified_base 13: mod_base = OTHER; note = 2'O-methyl adenosine
  modified_base 14: mod_base = OTHER; note = 2'O-methyl uridine
  modified_base 15: mod_base = OTHER; note = 2'O-methyl guanosine
  modified_base 16: mod_base = OTHER; note = 2'O-methyl uridine
  modified_base 17: mod_base = OTHER; note = 2'O-methyl cytidine
  modified_base 18: mod_base = OTHER; note = 2'O-methyl uridine
  modified_base 19: mod_base = OTHER; note = 2'O-methyl uridine
  modified_base 20: mod_base = OTHER; note = 2'O-methyl adenosine phosphorothioate
  modified_base 21: mod_base = OTHER; note = 2'O-methyl uridine
cccattaggataatgtcttat

SEQ ID NO: 1461 - RNA, 21 nt, synthetic construct
  source 1..21: mol_type = other RNA
  modified_base 1: mod_base = OTHER; note = 2'O-methyl uridine phosphorothioate
  modified_base 2: mod_base = OTHER; note = 2'O-methyl adenosine phosphorothioate
  modified_base 3: mod_base = OTHER; note = 2'O-methyl cytidine
  modified_base 4: mod_base = OTHER; note = 2'O-methyl cytidine
  modified_base 5: mod_base = OTHER; note = 2'-fluoro adenosine
  modified_base 6: mod_base = OTHER; note = 2'O-methyl guanosine
  modified_base 7: mod_base = OTHER; note = 2'O-methyl adenosine
  modified_base 8: mod_base = OTHER; note = 2'O-methyl guanosine
  modified_base 9: mod_base = OTHER; note = 2'-fluoro uridine
  modified_base 10: mod_base = OTHER; note = 2'-fluoro guanosine
  modified_base 11: mod_base = OTHER; note = 2'-fluoro uridine
  modified_base 12: mod_base = OTHER; note = 2'O-methyl cytidine
  modified_base 13: mod_base = OTHER; note = 2'O-methyl uridine
  modified_base 14: mod_base = OTHER; note = 2'-fluoro guanosine
  modified_base 15: mod_base = OTHER; note = 2'O-methyl adenosine
  modified_base 16: mod_base = OTHER; note = 2'O-methyl uridine
  modified_base 17: mod_base = OTHER; note = 2'O-methyl guanosine
  modified_base 18: mod_base = OTHER; note = 2'O-methyl guanosine
  modified_base 19: mod_base = OTHER; note = 2'-fluoro guanosine
  modified_base 20: mod_base = OTHER; note = 2'O-methyl guanosine phosphorothioate
  modified_base 21: mod_base = OTHER; note = 2'O-methyl adenosine
taccagagtgtctgatgggga

SEQ ID NO: 1462 - RNA, 21 nt, synthetic construct
  source 1..21: mol_type = other RNA
  modified_base 1: mod_base = OTHER; note = 2'O-methyl guanosine phosphorothioate
  modified_base 2: mod_base = OTHER; note = 2'O-methyl uridine phosphorothioate
  modified_base 3: mod_base = OTHER; note = 2'O-methyl guanosine
  modified_base 4: mod_base = OTHER; note = 2'O-methyl uridine
  modified_base 5: mod_base = OTHER; note = 2'-fluoro cytidine
  modified_base 6: mod_base = OTHER; note = 2'O-methyl uridine
  modified_base 7: mod_base = OTHER; note = 2'O-methyl guanosine
  modified_base 8: mod_base = OTHER; note = 2'O-methyl adenosine
  modified_base 9: mod_base = OTHER; note = 2'-fluoro cytidine
  modified_base 10: mod_base = OTHER; note = 2'-fluoro uridine
  modified_base 11: mod_base = OTHER; note = 2'-fluoro uridine
  modified_base 12: mod_base = OTHER; note = 2'O-methyl uridine
  modified_base 13: mod_base = OTHER; note = 2'O-methyl cytidine
  modified_base 14: mod_base = OTHER; note = 2'-fluoro guanosine
  modified_base 15: mod_base = OTHER; note = 2'O-methyl guanosine
  modified_base 16: mod_base = OTHER; note = 2'O-methyl uridine
  modified_base 17: mod_base = OTHER; note = 2'O-methyl cytidine
  modified_base 18: mod_base = OTHER; note = 2'O-methyl cytidine
  modified_base 19: mod_base = OTHER; note = 2'-fluoro adenosine
  modified_base 20: mod_base = OTHER; note = 2'O-methyl adenosine phosphorothioate
  modified_base 21: mod_base = OTHER; note = 2'O-methyl adenosine
gtgtctgactttcggtccaaa

SEQ ID NO: 1463 - RNA, 21 nt, synthetic construct
  source 1..21: mol_type = other RNA
  modified_base 1: mod_base = OTHER; note = 2'O-methyl uridine phosphorothioate
  modified_base 2: mod_base = OTHER; note = 2'O-methyl cytidine phosphorothioate
  modified_base 3: mod_base = OTHER; note = 2'O-methyl cytidine
  modified_base 4: mod_base = OTHER; note = 2'O-methyl adenosine
  modified_base 5: mod_base = OTHER; note = 2'-fluoro adenosine
  modified_base 6: mod_base = OTHER; note = 2'O-methyl adenosine
  modified_base 7: mod_base = OTHER; note = 2'O-methyl guanosine
  modified_base 8: mod_base = OTHER; note = 2'O-methyl adenosine
  modified_base 9: mod_base = OTHER; note = 2'-fluoro cytidine
  modified_base 10: mod_base = OTHER; note = 2'-fluoro guanosine
  modified_base 11: mod_base = OTHER; note = 2'-fluoro adenosine
  modified_base 12: mod_base = OTHER; note = 2'O-methyl adenosine
  modified_base 13: mod_base = OTHER; note = 2'O-methyl guanosine
  modified_base 14: mod_base = OTHER; note = 2'-fluoro uridine
  modified_base 15: mod_base = OTHER; note = 2'O-methyl cytidine
  modified_base 16: mod_base = OTHER; note = 2'O-methyl guanosine
  modified_base 17: mod_base = OTHER; note = 2'O-methyl uridine
  modified_base 18: mod_base = OTHER; note = 2'O-methyl guanosine
  modified_base 19: mod_base = OTHER; note = 2'-fluoro guanosine
  modified_base 20: mod_base = OTHER; note = 2'O-methyl adenosine phosphorothioate
  modified_base 21: mod_base = OTHER; note = 2'O-methyl uridine
tccaaagacgaagtcgtggat

SEQ ID NO: 1464 - RNA, 21 nt, synthetic construct
  source 1..21: mol_type = other RNA
  modified_base 1: mod_base = OTHER; note = 2'O-methyl guanosine phosphorothioate
  modified_base 2: mod_base = OTHER; note = 2'O-methyl adenosine phosphorothioate
  modified_base 3: mod_base = OTHER; note = 2'O-methyl adenosine
  modified_base 4: mod_base = OTHER; note = 2'O-methyl guanosine
  modified_base 5: mod_base = OTHER; note = 2'-fluoro uridine
  modified_base 6: mod_base = OTHER; note = 2'O-methyl cytidine
  modified_base 7: mod_base = OTHER; note = 2'O-methyl guanosine
  modified_base 8: mod_base = OTHER; note = 2'O-methyl uridine
  modified_base 9: mod_base = OTHER; note = 2'-fluoro guanosine
  modified_base 10: mod_base = OTHER; note = 2'-fluoro guanosine
  modified_base 11: mod_base = OTHER; note = 2'-fluoro adenosine
  modified_base 12: mod_base = OTHER; note = 2'O-methyl uridine
  modified_base 13: mod_base = OTHER; note = 2'O-methyl guanosine
  modified_base 14: mod_base = OTHER; note = 2'-fluoro cytidine
  modified_base 15: mod_base = OTHER; note = 2'O-methyl cytidine
  modified_base 16: mod_base = OTHER; note = 2'O-methyl uridine
  modified_base 17: mod_base = OTHER; note = 2'O-methyl uridine
  modified_base 18: mod_base = OTHER; note = 2'O-methyl guanosine
  modified_base 19: mod_base = OTHER; note = 2'-fluoro guanosine
  modified_base 20: mod_base = OTHER; note = 2'O-methyl uridine phosphorothioate
  modified_base 21: mod_base = OTHER; note = 2'O-methyl adenosine
gaagtcgtggatgccttggta

SEQ ID NO: 1465 - RNA, 21 nt, synthetic construct
  source 1..21: mol_type = other RNA
  modified_base 1: mod_base = OTHER; note = 2'O-methyl guanosine phosphorothioate
  modified_base 2: mod_base = OTHER; note = 2'O-methyl uridine phosphorothioate
  modified_base 3: mod_base = OTHER; note = 2'O-methyl cytidine
  modified_base 4: mod_base = OTHER; note = 2'O-methyl guanosine
  modified_base 5: mod_base = OTHER; note = 2'-fluoro uridine
  modified_base 6: mod_base = OTHER; note = 2'O-methyl guanosine
  modified_base 7: mod_base = OTHER; note = 2'O-methyl guanosine
  modified_base 8: mod_base = OTHER; note = 2'O-methyl adenosine
  modified_base 9: mod_base = OTHER; note = 2'-fluoro uridine
  modified_base 10: mod_base = OTHER; note = 2'-fluoro guanosine
  modified_base 11: mod_base = OTHER; note = 2'-fluoro cytidine
  modified_base 12: mod_base = OTHER; note = 2'O-methyl cytidine
  modified_base 13: mod_base = OTHER; note = 2'O-methyl uridine
  modified_base 14: mod_base = OTHER; note = 2'-fluoro uridine
  modified_base 15: mod_base = OTHER; note = 2'O-methyl guanosine
  modified_base 16: mod_base = OTHER; note = 2'O-methyl guanosine
  modified_base 17: mod_base = OTHER; note = 2'O-methyl uridine
  modified_base 18: mod_base = OTHER; note = 2'O-methyl adenosine
  modified_base 19: mod_base = OTHER; note = 2'-fluoro uridine
  modified_base 20: mod_base = OTHER; note = 2'O-methyl guanosine phosphorothioate
  modified_base 21: mod_base = OTHER; note = 2'O-methyl uridine
gtcgtggatgccttggtatgt

SEQ ID NO: 1466 - RNA, 21 nt, synthetic construct
  source 1..21: mol_type = other RNA
  modified_base 1: mod_base = OTHER; note = 2'O-methyl uridine phosphorothioate
  modified_base 2: mod_base = OTHER; note = 2'O-methyl cytidine phosphorothioate
  modified_base 3: mod_base = OTHER; note = 2'O-methyl guanosine
  modified_base 4: mod_base = OTHER; note = 2'O-methyl uridine
  modified_base 5: mod_base = OTHER; note = 2'-fluoro guanosine
  modified_base 6: mod_base = OTHER; note = 2'O-methyl guanosine
  modified_base 7: mod_base = OTHER; note = 2'O-methyl adenosine
  modified_base 8: mod_base = OTHER; note = 2'O-methyl uridine
  modified_base 9: mod_base = OTHER; note = 2'-fluoro guanosine
  modified_base 10: mod_base = OTHER; note = 2'-fluoro cytidine
  modified_base 11: mod_base = OTHER; note = 2'-fluoro cytidine
  modified_base 12: mod_base = OTHER; note = 2'O-methyl uridine
  modified_base 13: mod_base = OTHER; note = 2'O-methyl uridine
  modified_base 14: mod_base = OTHER; note = 2'-fluoro guanosine
  modified_base 15: mod_base = OTHER; note = 2'O-methyl guanosine
  modified_base 16: mod_base = OTHER; note = 2'O-methyl uridine
  modified_base 17: mod_base = OTHER; note = 2'O-methyl adenosine
  modified_base 18: mod_base = OTHER; note = 2'O-methyl uridine
  modified_base 19: mod_base = OTHER; note = 2'-fluoro guanosine
  modified_base 20: mod_base = OTHER; note = 2'O-methyl uridine phosphorothioate
  modified_base 21: mod_base = OTHER; note = 2'O-methyl uridine
tcgtggatgccttggtatgtt

SEQ ID NO: 1467 - RNA, 21 nt, synthetic construct
  source 1..21: mol_type = other RNA
  modified_base 1: mod_base = OTHER; note = 2'O-methyl guanosine phosphorothioate
  modified_base 2: mod_base = OTHER; note = 2'O-methyl cytidine phosphorothioate
  modified_base 3: mod_base = OTHER; note = 2'O-methyl cytidine
  modified_base 4: mod_base = OTHER; note = 2'O-methyl uridine
  modified_base 5: mod_base = OTHER; note = 2'-fluoro uridine
  modified_base 6: mod_base = OTHER; note = 2'O-methyl guanosine
  modified_base 7: mod_base = OTHER; note = 2'O-methyl guanosine
  modified_base 8: mod_base = OTHER; note = 2'O-methyl uridine
  modified_base 9: mod_base = OTHER; note = 2'-fluoro adenosine
  modified_base 10: mod_base = OTHER; note = 2'-fluoro uridine
  modified_base 11: mod_base = OTHER; note = 2'-fluoro guanosine
  modified_base 12: mod_base = OTHER; note = 2'O-methyl uridine
  modified_base 13: mod_base = OTHER; note = 2'O-methyl uridine
  modified_base 14: mod_base = OTHER; note = 2'-fluoro cytidine
  modified_base 15: mod_base = OTHER; note = 2'O-methyl cytidine
  modified_base 16: mod_base = OTHER; note = 2'O-methyl uridine
  modified_base 17: mod_base = OTHER; note = 2'O-methyl guanosine
  modified_base 18: mod_base = OTHER; note = 2'O-methyl cytidine
  modified_base 19: mod_base = OTHER; note = 2'-fluoro uridine
  modified_base 20: mod_base = OTHER; note = 2'O-methyl uridine phosphorothioate
  modified_base 21: mod_base = OTHER; note = 2'O-methyl cytidine
gccttggtatgttcctgcttc

SEQ ID NO: 1468 - RNA, 21 nt, synthetic construct
  source 1..21: mol_type = other RNA
  modified_base 1: mod_base = OTHER; note = 2'O-methyl adenosine phosphorothioate
  modified_base 2: mod_base = OTHER; note = 2'O-methyl uridine phosphorothioate
  modified_base 3: mod_base = OTHER; note = 2'O-methyl guanosine
  modified_base 4: mod_base = OTHER; note = 2'O-methyl cytidine
  modified_base 5: mod_base = OTHER; note = 2'-fluoro cytidine
  modified_base 6: mod_base = OTHER; note = 2'O-methyl adenosine
  modified_base 7: mod_base = OTHER; note = 2'O-methyl adenosine
  modified_base 8: mod_base = OTHER; note = 2'O-methyl adenosine
  modified_base 9: mod_base = OTHER; note = 2'-fluoro adenosine
  modified_base 10: mod_base = OTHER; note = 2'-fluoro cytidine
  modified_base 11: mod_base = OTHER; note = 2'-fluoro adenosine
  modified_base 12: mod_base = OTHER; note = 2'O-methyl adenosine
  modified_base 13: mod_base = OTHER; note = 2'O-methyl cytidine
  modified_base 14: mod_base = OTHER; note = 2'-fluoro cytidine
  modified_base 15: mod_base = OTHER; note = 2'O-methyl adenosine
  modified_base 16: mod_base = OTHER; note = 2'O-methyl uridine
  modified_base 17: mod_base = OTHER; note = 2'O-methyl cytidine
  modified_base 18: mod_base = OTHER; note = 2'O-methyl adenosine
  modified_base 19: mod_base = OTHER; note = 2'-fluoro cytidine
  modified_base 20: mod_base = OTHER; note = 2'O-methyl cytidine phosphorothioate
  modified_base 21: mod_base = OTHER; note = 2'O-methyl guanosine
atgccaaaacaaccatcaccg

SEQ ID NO: 1469 - RNA, 21 nt, synthetic construct
  source 1..21: mol_type = other RNA
  modified_base 1: mod_base = OTHER; note = 2'O-methyl cytidine phosphorothioate
  modified_base 2: mod_base = OTHER; note = 2'O-methyl cytidine phosphorothioate
  modified_base 3: mod_base = OTHER; note = 2'O-methyl adenosine
  modified_base 4: mod_base = OTHER; note = 2'O-methyl adenosine
  modified_base 5: mod_base = OTHER; note = 2'-fluoro adenosine
  modified_base 6: mod_base = OTHER; note = 2'O-methyl adenosine
  modified_base 7: mod_base = OTHER; note = 2'O-methyl cytidine
  modified_base 8: mod_base = OTHER; note = 2'O-methyl adenosine
  modified_base 9: mod_base = OTHER; note = 2'-fluoro adenosine
  modified_base 10: mod_base = OTHER; note = 2'-fluoro cytidine
  modified_base 11: mod_base = OTHER; note = 2'-fluoro cytidine
  modified_base 12: mod_base = OTHER; note = 2'O-methyl adenosine
  modified_base 13: mod_base = OTHER; note = 2'O-methyl uridine
  modified_base 14: mod_base = OTHER; note = 2'-fluoro cytidine
  modified_base 15: mod_base = OTHER; note = 2'O-methyl adenosine
  modified_base 16: mod_base = OTHER; note = 2'O-methyl cytidine
  modified_base 17: mod_base = OTHER; note = 2'O-methyl cytidine
  modified_base 18: mod_base = OTHER; note = 2'O-methyl guanosine
  modified_base 19: mod_base = OTHER; note = 2'-fluoro uridine
  modified_base 20: mod_base = OTHER; note = 2'O-methyl guanosine phosphorothioate
  modified_base 21: mod_base = OTHER; note = 2'O-methyl uridine
ccaaaacaaccatcaccgtgt

SEQ ID NO: 1470 - RNA, 21 nt, synthetic construct
  source 1..21: mol_type = other RNA
  modified_base 1: mod_base = OTHER; note = 2'O-methyl cytidine phosphorothioate
  modified_base 2: mod_base = OTHER; note = 2'O-methyl guanosine phosphorothioate
  modified_base 3: mod_base = OTHER; note = 2'O-methyl adenosine
  modified_base 4: mod_base = OTHER; note = 2'O-methyl cytidine
  modified_base 5: mod_base = OTHER; note = 2'-fluoro adenosine
  modified_base 6: mod_base = OTHER; note = 2'O-methyl uridine
  modified_base 7: mod_base = OTHER; note = 2'O-methyl cytidine
  modified_base 8: mod_base = OTHER; note = 2'O-methyl uridine
  modified_base 9: mod_base = OTHER; note = 2'-fluoro guanosine
  modified_base 10: mod_base = OTHER; note = 2'-fluoro cytidine
  modified_base 11: mod_base = OTHER; note = 2'-fluoro cytidine
  modified_base 12: mod_base = OTHER; note = 2'O-methyl cytidine
  modified_base 13: mod_base = OTHER; note = 2'O-methyl uridine
  modified_base 14: mod_base = OTHER; note = 2'-fluoro adenosine
  modified_base 15: mod_base = OTHER; note = 2'O-methyl adenosine
  modified_base 16: mod_base = OTHER; note = 2'O-methyl adenosine
  modified_base 17: mod_base = OTHER; note = 2'O-methyl guanosine
  modified_base 18: mod_base = OTHER; note = 2'O-methyl uridine
  modified_base 19: mod_base = OTHER; note = 2'-fluoro cytidine
  modified_base 20: mod_base = OTHER; note = 2'O-methyl adenosine phosphorothioate
  modified_base 21: mod_base = OTHER; note = 2'O-methyl adenosine
cgacatctgccctaaagtcaa

SEQ ID NO: 1471 - RNA, 21 nt, synthetic construct
  source 1..21: mol_type = other RNA
  modified_base 1: mod_base = OTHER; note = 2'O-methyl adenosine phosphorothioate
  modified_base 2: mod_base = OTHER; note = 2'O-methyl uridine phosphorothioate
  modified_base 3: mod_base = OTHER; note = 2'O-methyl cytidine
  modified_base 4: mod_base = OTHER; note = 2'O-methyl adenosine
  modified_base 5: mod_base = OTHER; note = 2'-fluoro cytidine
  modified_base 6: mod_base = OTHER; note = 2'O-methyl cytidine
  modified_base 7: mod_base = OTHER; note = 2'O-methyl adenosine
  modified_base 8: mod_base = OTHER; note = 2'O-methyl adenosine
  modified_base 9: mod_base = OTHER; note = 2'-fluoro guanosine
  modified_base 10: mod_base = OTHER; note = 2'-fluoro cytidine
  modified_base 11: mod_base = OTHER; note = 2'-fluoro uridine
  modified_base 12: mod_base = OTHER; note = 2'O-methyl cytidine
  modified_base 13: mod_base = OTHER; note = 2'O-methyl adenosine
  modified_base 14: mod_base = OTHER; note = 2'-fluoro guanosine
  modified_base 15: mod_base = OTHER; note = 2'O-methyl uridine
  modified_base 16: mod_base = OTHER; note = 2'O-methyl cytidine
  modified_base 17: mod_base = OTHER; note = 2'O-methyl uridine
  modified_base 18: mod_base = OTHER; note = 2'O-methyl adenosine
  modified_base 19: mod_base = OTHER; note = 2'-fluoro cytidine
  modified_base 20: mod_base = OTHER; note = 2'O-methyl guanosine phosphorothioate
  modified_base 21: mod_base = OTHER; note = 2'O-methyl cytidine
atcaccaagctcagtctacgc

SEQ ID NO: 1472 - RNA, 21 nt, synthetic construct
  source 1..21: mol_type = other RNA
  modified_base 1: mod_base = OTHER; note = 2'O-methyl cytidine phosphorothioate
  modified_base 2: mod_base = OTHER; note = 2'O-methyl cytidine phosphorothioate
  modified_base 3: mod_base = OTHER; note = 2'O-methyl cytidine
  modified_base 4: mod_base = OTHER; note = 2'O-methyl adenosine
  modified_base 5: mod_base = OTHER; note = 2'-fluoro uridine
  modified_base 6: mod_base = OTHER; note = 2'O-methyl uridine
  modified_base 7: mod_base = OTHER; note = 2'O-methyl adenosine
  modified_base 8: mod_base = OTHER; note = 2'O-methyl guanosine
  modified_base 9: mod_base = OTHER; note = 2'-fluoro guanosine
  modified_base 10: mod_base = OTHER; note = 2'-fluoro adenosine
  modified_base 11: mod_base = OTHER; note = 2'-fluoro uridine
  modified_base 12: mod_base = OTHER; note = 2'O-methyl adenosine
  modified_base 13: mod_base = OTHER; note = 2'O-methyl adenosine
  modified_base 14: mod_base = OTHER; note = 2'-fluoro uridine
  modified_base 15: mod_base = OTHER; note = 2'O-methyl guanosine
  modified_base 16: mod_base = OTHER; note = 2'O-methyl uridine
  modified_base 17: mod_base = OTHER; note = 2'O-methyl cytidine
  modified_base 18: mod_base = OTHER; note = 2'O-methyl uridine
  modified_base 19: mod_base = OTHER; note = 2'-fluoro uridine
  modified_base 20: mod_base = OTHER; note = 2'O-methyl adenosine phosphorothioate
  modified_base 21: mod_base = OTHER; note = 2'O-methyl uridine
cccattaggataatgtcttat

SEQ ID NO: 1473 - RNA, 21 nt, synthetic construct
  source 1..21: mol_type = other RNA
  modified_base 1: mod_base = OTHER; note = 2'O-methyl uridine phosphorothioate
  modified_base 2: mod_base = OTHER; note = 2'O-methyl adenosine phosphorothioate
  modified_base 3: mod_base = OTHER; note = 2'O-methyl cytidine
  modified_base 4: mod_base = OTHER; note = 2'O-methyl cytidine
  modified_base 5: mod_base = OTHER; note = 2'-fluoro adenosine
  modified_base 6: mod_base = OTHER; note = 2'O-methyl guanosine
  modified_base 7: mod_base = OTHER; note = 2'O-methyl adenosine
  modified_base 8: mod_base = OTHER; note = 2'O-methyl guanosine
  modified_base 9: mod_base = OTHER; note = 2'-fluoro uridine
  modified_base 10: mod_base = OTHER; note = 2'-fluoro guanosine
  modified_base 11: mod_base = OTHER; note = 2'-fluoro uridine
  modified_base 12: mod_base = OTHER; note = 2'O-methyl cytidine
  modified_base 13: mod_base = OTHER; note = 2'O-methyl uridine
  modified_base 14: mod_base = OTHER; note = 2'-fluoro guanosine
  modified_base 15: mod_base = OTHER; note = 2'O-methyl adenosine
  modified_base 16: mod_base = OTHER; note = 2'O-methyl uridine
  modified_base 17: mod_base = OTHER; note = 2'O-methyl guanosine
  modified_base 18: mod_base = OTHER; note = 2'O-methyl guanosine
  modified_base 19: mod_base = OTHER; note = 2'-fluoro guanosine
  modified_base 20: mod_base = OTHER; note = 2'O-methyl guanosine phosphorothioate
  modified_base 21: mod_base = OTHER; note = 2'O-methyl adenosine
taccagagtgtctgatgggga

SEQ ID NO: 1474 - RNA, 21 nt, synthetic construct
  source 1..21: mol_type = other RNA
  modified_base 1: mod_base = OTHER; note = 2'O-methyl guanosine phosphorothioate
  modified_base 2: mod_base = OTHER; note = 2'O-methyl uridine phosphorothioate
  modified_base 3: mod_base = OTHER; note = 2'O-methyl guanosine
  modified_base 4: mod_base = OTHER; note = 2'O-methyl uridine
  modified_base 5: mod_base = OTHER; note = 2'-fluoro cytidine
  modified_base 6: mod_base = OTHER; note = 2'O-methyl uridine
  modified_base 7: mod_base = OTHER; note = 2'O-methyl guanosine
  modified_base 8: mod_base = OTHER; note = 2'O-methyl adenosine
  modified_base 9: mod_base = OTHER; note = 2'-fluoro cytidine
  modified_base 10: mod_base = OTHER; note = 2'-fluoro uridine
  modified_base 11: mod_base = OTHER; note = 2'-fluoro uridine
  modified_base 12: mod_base = OTHER; note = 2'O-methyl uridine
  modified_base 13: mod_base = OTHER; note = 2'O-methyl cytidine
  modified_base 14: mod_base = OTHER; note = 2'-fluoro guanosine
  modified_base 15: mod_base = OTHER; note = 2'O-methyl guanosine
  modified_base 16: mod_base = OTHER; note = 2'O-methyl uridine
  modified_base 17: mod_base = OTHER; note = 2'O-methyl cytidine
  modified_base 18: mod_base = OTHER; note = 2'O-methyl cytidine
  modified_base 19: mod_base = OTHER; note = 2'-fluoro adenosine
  modified_base 20: mod_base = OTHER; note = 2'O-methyl adenosine phosphorothioate
  modified_base 21: mod_base = OTHER; note = 2'O-methyl adenosine
gtgtctgactttcggtccaaa

SEQ ID NO: 1475 - RNA, 21 nt, synthetic construct
  source 1..21: mol_type = other RNA
  modified_base 1: mod_base = OTHER; note = 2'O-methyl uridine phosphorothioate
  modified_base 2: mod_base = OTHER; note = 2'O-methyl cytidine phosphorothioate
  modified_base 3: mod_base = OTHER; note = 2'O-methyl cytidine
  modified_base 4: mod_base = OTHER; note = 2'O-methyl adenosine
  modified_base 5: mod_base = OTHER; note = 2'-fluoro adenosine
  modified_base 6: mod_base = OTHER; note = 2'O-methyl adenosine
  modified_base 7: mod_base = OTHER; note = 2'O-methyl guanosine
  modified_base 8: mod_base = OTHER; note = 2'O-methyl adenosine
  modified_base 9: mod_base = OTHER; note = 2'-fluoro cytidine
  modified_base 10: mod_base = OTHER; note = 2'-fluoro guanosine
  modified_base 11: mod_base = OTHER; note = 2'-fluoro adenosine
  modified_base 12: mod_base = OTHER; note = 2'O-methyl adenosine
  modified_base 13: mod_base = OTHER; note = 2'O-methyl guanosine
  modified_base 14: mod_base = OTHER; note = 2'-fluoro uridine
  modified_base 15: mod_base = OTHER; note = 2'O-methyl cytidine
  modified_base 16: mod_base = OTHER; note = 2'O-methyl guanosine
  modified_base 17: mod_base = OTHER; note = 2'O-methyl uridine
  modified_base 18: mod_base = OTHER; note = 2'O-methyl guanosine
  modified_base 19: mod_base = OTHER; note = 2'-fluoro guanosine
  modified_base 20: mod_base = OTHER; note = 2'O-methyl adenosine phosphorothioate
  modified_base 21: mod_base = OTHER; note = 2'O-methyl uridine
tccaaagacgaagtcgtggat

SEQ ID NO: 1476 - RNA, 21 nt, synthetic construct
  source 1..21: mol_type = other RNA
  modified_base 1: mod_base = OTHER; note = 2'O-methyl guanosine phosphorothioate
  modified_base 2: mod_base = OTHER; note = 2'O-methyl adenosine phosphorothioate
  modified_base 3: mod_base = OTHER; note = 2'O-methyl adenosine
  modified_base 4: mod_base = OTHER; note = 2'O-methyl guanosine
  modified_base 5: mod_base = OTHER; note = 2'-fluoro uridine
  modified_base 6: mod_base = OTHER; note = 2'O-methyl cytidine
  modified_base 7: mod_base = OTHER; note = 2'O-methyl guanosine
  modified_base 8: mod_base = OTHER; note = 2'O-methyl uridine
  modified_base 9: mod_base = OTHER; note = 2'-fluoro guanosine
  modified_base 10: mod_base = OTHER; note = 2'-fluoro guanosine
  modified_base 11: mod_base = OTHER; note = 2'-fluoro adenosine
  modified_base 12: mod_base = OTHER; note = 2'O-methyl uridine
  modified_base 13: mod_base = OTHER; note = 2'O-methyl guanosine
  modified_base 14: mod_base = OTHER; note = 2'-fluoro cytidine
  modified_base 15: mod_base = OTHER; note = 2'O-methyl cytidine
  modified_base 16: mod_base = OTHER; note = 2'O-methyl uridine
  modified_base 17: mod_base = OTHER; note = 2'O-methyl uridine
  modified_base 18: mod_base = OTHER; note = 2'O-methyl guanosine
  modified_base 19: mod_base = OTHER; note = 2'-fluoro guanosine
  modified_base 20: mod_base = OTHER; note = 2'O-methyl uridine phosphorothioate
  modified_base 21: mod_base = OTHER; note = 2'O-methyl adenosine
gaagtcgtggatgccttggta

SEQ ID NO: 1477 - RNA, 21 nt, synthetic construct
  source 1..21: mol_type = other RNA
  modified_base 1: mod_base = OTHER; note = 2'O-methyl guanosine phosphorothioate
  modified_base 2: mod_base = OTHER; note = 2'O-methyl uridine phosphorothioate
  modified_base 3: mod_base = OTHER; note = 2'O-methyl cytidine
  modified_base 4: mod_base = OTHER; note = 2'O-methyl guanosine
  modified_base 5: mod_base = OTHER; note = 2'-fluoro uridine
  modified_base 6: mod_base = OTHER; note = 2'O-methyl guanosine
  modified_base 7: mod_base = OTHER; note = 2'O-methyl guanosine
  modified_base 8: mod_base = OTHER; note = 2'O-methyl adenosine
  modified_base 9: mod_base = OTHER; note = 2'-fluoro uridine
  modified_base 10: mod_base = OTHER; note = 2'-fluoro guanosine
  modified_base 11: mod_base = OTHER; note = 2'-fluoro cytidine
  modified_base 12: mod_base = OTHER; note = 2'O-methyl cytidine
  modified_base 13: mod_base = OTHER; note = 2'O-methyl uridine
  modified_base 14: mod_base = OTHER; note = 2'-fluoro uridine
  modified_base 15: mod_base = OTHER; note = 2'O-methyl guanosine
  modified_base 16: mod_base = OTHER; note = 2'O-methyl guanosine
  modified_base 17: mod_base = OTHER; note = 2'O-methyl uridine
  modified_base 18: mod_base = OTHER; note = 2'O-methyl adenosine
  modified_base 19: mod_base = OTHER; note = 2'-fluoro uridine
  modified_base 20: mod_base = OTHER; note = 2'O-methyl guanosine phosphorothioate
  modified_base 21: mod_base = OTHER; note = 2'O-methyl uridine
gtcgtggatgccttggtatgt

SEQ ID NO: 1478 - RNA, 21 nt, synthetic construct
  source 1..21: mol_type = other RNA
  modified_base 1: mod_base = OTHER; note = 2'O-methyl uridine phosphorothioate
  modified_base 2: mod_base = OTHER; note = 2'O-methyl cytidine phosphorothioate
  modified_base 3: mod_base = OTHER; note = 2'O-methyl guanosine
  modified_base 4: mod_base = OTHER; note = 2'O-methyl uridine
  modified_base 5: mod_base = OTHER; note = 2'-fluoro guanosine
  modified_base 6: mod_base = OTHER; note = 2'O-methyl guanosine
  modified_base 7: mod_base = OTHER; note = 2'O-methyl adenosine
  modified_base 8: mod_base = OTHER; note = 2'O-methyl uridine
  modified_base 9: mod_base = OTHER; note = 2'-fluoro guanosine
  modified_base 10: mod_base = OTHER; note = 2'-fluoro cytidine
  modified_base 11: mod_base = OTHER; note = 2'-fluoro cytidine
  modified_base 12: mod_base = OTHER; note = 2'O-methyl uridine
  modified_base 13: mod_base = OTHER; note = 2'O-methyl uridine
  modified_base 14: mod_base = OTHER; note = 2'-fluoro guanosine
  modified_base 15: mod_base = OTHER; note = 2'O-methyl guanosine
  modified_base 16: mod_base = OTHER; note = 2'O-methyl uridine
  modified_base 17: mod_base = OTHER; note = 2'O-methyl adenosine
  modified_base 18: mod_base = OTHER; note = 2'O-methyl uridine
  modified_base 19: mod_base = OTHER; note = 2'-fluoro guanosine
  modified_base 20: mod_base = OTHER; note = 2'O-methyl uridine phosphorothioate
  modified_base 21: mod_base = OTHER; note = 2'O-methyl uridine
tcgtggatgccttggtatgtt

SEQ ID NO: 1479 - RNA, 21 nt, synthetic construct
  source 1..21: mol_type = other RNA
  modified_base 1: mod_base = OTHER; note = 2'O-methyl guanosine phosphorothioate
  modified_base 2: mod_base = OTHER; note = 2'O-methyl cytidine phosphorothioate
  modified_base 3: mod_base = OTHER; note = 2'O-methyl cytidine
  modified_base 4: mod_base = OTHER; note = 2'O-methyl uridine
  modified_base 5: mod_base = OTHER; note = 2'-fluoro uridine
  modified_base 6: mod_base = OTHER; note = 2'O-methyl guanosine
  modified_base 7: mod_base = OTHER; note = 2'O-methyl guanosine
  modified_base 8: mod_base = OTHER; note = 2'O-methyl uridine
  modified_base 9: mod_base = OTHER; note = 2'-fluoro adenosine
  modified_base 10: mod_base = OTHER; note = 2'-fluoro uridine
  modified_base 11: mod_base = OTHER; note = 2'-fluoro guanosine
  modified_base 12: mod_base = OTHER; note = 2'O-methyl uridine
  modified_base 13: mod_base = OTHER; note = 2'O-methyl uridine
  modified_base 14: mod_base = OTHER; note = 2'-fluoro cytidine
  modified_base 15: mod_base = OTHER; note = 2'O-methyl cytidine
  modified_base 16: mod_base = OTHER; note = 2'O-methyl uridine
  modified_base 17: mod_base = OTHER; note = 2'O-methyl guanosine
  modified_base 18: mod_base = OTHER; note = 2'O-methyl cytidine
  modified_base 19: mod_base = OTHER; note = 2'-fluoro uridine
  modified_base 20: mod_base = OTHER; note = 2'O-methyl uridine phosphorothioate
  modified_base 21: mod_base = OTHER; note = 2'O-methyl cytidine
gccttggtatgttcctgcttc

SEQ ID NO: 1480 - RNA, 21 nt, synthetic construct
  source 1..21: mol_type = other RNA
  modified_base 1: mod_base = OTHER; note = 2'O-methyl adenosine phosphorothioate
  modified_base 2: mod_base = OTHER; note = 2'O-methyl uridine phosphorothioate
  modified_base 3: mod_base = OTHER; note = 2'O-methyl guanosine
  modified_base 4: mod_base = OTHER; note = 2'O-methyl cytidine
  modified_base 5: mod_base = OTHER; note = 2'-fluoro cytidine
  modified_base 6: mod_base = OTHER; note = 2'O-methyl adenosine
  modified_base 7: mod_base = OTHER; note = 2'O-methyl adenosine
  modified_base 8: mod_base = OTHER; note = 2'O-methyl adenosine
  modified_base 9: mod_base = OTHER; note = 2'-fluoro adenosine
  modified_base 10: mod_base = OTHER; note = 2'-fluoro cytidine
  modified_base 11: mod_base = OTHER; note = 2'-fluoro adenosine
  modified_base 12: mod_base = OTHER; note = 2'O-methyl adenosine
  modified_base 13: mod_base = OTHER; note = 2'O-methyl cytidine
  modified_base 14: mod_base = OTHER; note = 2'-fluoro cytidine
  modified_base 15: mod_base = OTHER; note = 2'O-methyl adenosine
  modified_base 16: mod_base = OTHER; note = 2'O-methyl uridine
  modified_base 17: mod_base = OTHER; note = 2'O-methyl cytidine
  modified_base 18: mod_base = OTHER; note = 2'O-methyl adenosine
  modified_base 19: mod_base = OTHER; note = 2'-fluoro cytidine
  modified_base 20: mod_base = OTHER; note = 2'O-methyl cytidine phosphorothioate
  modified_base 21: mod_base = OTHER; note = 2'O-methyl guanosine
atgccaaaacaaccatcaccg

SEQ ID NO: 1481 - RNA, 21 nt, synthetic construct
  source 1..21: mol_type = other RNA
  modified_base 1: mod_base = OTHER; note = 2'O-methyl cytidine phosphorothioate
  modified_base 2: mod_base = OTHER; note = 2'O-methyl cytidine phosphorothioate
  modified_base 3: mod_base = OTHER; note = 2'O-methyl adenosine
  modified_base 4: mod_base = OTHER; note = 2'O-methyl adenosine
  modified_base 5: mod_base = OTHER; note = 2'-fluoro adenosine
  modified_base 6: mod_base = OTHER; note = 2'O-methyl adenosine
  modified_base 7: mod_base = OTHER; note = 2'O-methyl cytidine
  modified_base 8: mod_base = OTHER; note = 2'O-methyl adenosine
  modified_base 9: mod_base = OTHER; note = 2'-fluoro adenosine
  modified_base 10: mod_base = OTHER; note = 2'-fluoro cytidine
  modified_base 11: mod_base = OTHER; note = 2'-fluoro cytidine
  modified_base 12: mod_base = OTHER; note = 2'O-methyl adenosine
  modified_base 13: mod_base = OTHER; note = 2'O-methyl uridine
  modified_base 14: mod_base = OTHER; note = 2'-fluoro cytidine
  modified_base 15: mod_base = OTHER; note = 2'O-methyl adenosine
  modified_base 16: mod_base = OTHER; note = 2'O-methyl cytidine
  modified_base 17: mod_base = OTHER; note = 2'O-methyl cytidine
  modified_base 18: mod_base = OTHER; note = 2'O-methyl guanosine
  modified_base 19: mod_base = OTHER; note = 2'-fluoro uridine
  modified_base 20: mod_base = OTHER; note = 2'O-methyl guanosine phosphorothioate
  modified_base 21: mod_base = OTHER; note = 2'O-methyl uridine
ccaaaacaaccatcaccgtgt

SEQ ID NO: 1482 - RNA, 21 nt, synthetic construct
  source 1..21: mol_type = other RNA
  modified_base 1: mod_base = OTHER; note = 2'O-methyl cytidine phosphorothioate
  modified_base 2: mod_base = OTHER; note = 2'O-methyl guanosine phosphorothioate
  modified_base 3: mod_base = OTHER; note = 2'O-methyl adenosine
  modified_base 4: mod_base = OTHER; note = 2'O-methyl cytidine
  modified_base 5: mod_base = OTHER; note = 2'-fluoro adenosine
  modified_base 6: mod_base = OTHER; note = 2'O-methyl uridine
  modified_base 7: mod_base = OTHER; note = 2'O-methyl cytidine
  modified_base 8: mod_base = OTHER; note = 2'O-methyl uridine
  modified_base 9: mod_base = OTHER; note = 2'-fluoro guanosine
  modified_base 10: mod_base = OTHER; note = 2'-fluoro cytidine
  modified_base 11: mod_base = OTHER; note = 2'-fluoro cytidine
  modified_base 12: mod_base = OTHER; note = 2'O-methyl cytidine
  modified_base 13: mod_base = OTHER; note = 2'O-methyl uridine
  modified_base 14: mod_base = OTHER; note = 2'-fluoro adenosine
  modified_base 15: mod_base = OTHER; note = 2'O-methyl adenosine
  modified_base 16: mod_base = OTHER; note = 2'O-methyl adenosine
  modified_base 17: mod_base = OTHER; note = 2'O-methyl guanosine
  modified_base 18: mod_base = OTHER; note = 2'O-methyl uridine
  modified_base 19: mod_base = OTHER; note = 2'-fluoro cytidine
  modified_base 20: mod_base = OTHER; note = 2'O-methyl adenosine phosphorothioate
  modified_base 21: mod_base = OTHER; note = 2'O-methyl adenosine
cgacatctgccctaaagtcaa

SEQ ID NO: 1483 - RNA, 21 nt, synthetic construct
  source 1..21: mol_type = other RNA
  modified_base 1: mod_base = OTHER; note = 2'O-methyl adenosine phosphorothioate
  modified_base 2: mod_base = OTHER; note = 2'O-methyl uridine phosphorothioate
  modified_base 3: mod_base = OTHER; note = 2'O-methyl cytidine
  modified_base 4: mod_base = OTHER; note = 2'O-methyl adenosine
  modified_base 5: mod_base = OTHER; note = 2'-fluoro cytidine
  modified_base 6: mod_base = OTHER; note = 2'O-methyl cytidine
  modified_base 7: mod_base = OTHER; note = 2'O-methyl adenosine
  modified_base 8: mod_base = OTHER; note = 2'O-methyl adenosine
  modified_base 9: mod_base = OTHER; note = 2'-fluoro guanosine
  modified_base 10: mod_base = OTHER; note = 2'-fluoro cytidine
  modified_base 11: mod_base = OTHER; note = 2'-fluoro uridine
  modified_base 12: mod_base = OTHER; note = 2'O-methyl cytidine
  modified_base 13: mod_base = OTHER; note = 2'O-methyl adenosine
  modified_base 14: mod_base = OTHER; note = 2'-fluoro guanosine
  modified_base 15: mod_base = OTHER; note = 2'O-methyl uridine
  modified_base 16: mod_base = OTHER; note = 2'O-methyl cytidine
  modified_base 17: mod_base = OTHER; note = 2'O-methyl uridine
  modified_base 18: mod_base = OTHER; note = 2'O-methyl adenosine
  modified_base 19: mod_base = OTHER; note = 2'-fluoro cytidine
  modified_base 20: mod_base = OTHER; note = 2'O-methyl guanosine phosphorothioate
  modified_base 21: mod_base = OTHER; note = 2'O-methyl cytidine
atcaccaagctcagtctacgc

SEQ ID NO: 1484 - RNA, 21 nt, synthetic construct
  source 1..21: mol_type = other RNA
  modified_base 1: mod_base = OTHER; note = 2'O-methyl cytidine phosphorothioate
  modified_base 2: mod_base = OTHER; note = 2'O-methyl cytidine phosphorothioate
  modified_base 3: mod_base = OTHER; note = 2'O-methyl cytidine
  modified_base 4: mod_base = OTHER; note = 2'O-methyl adenosine
  modified_base 5: mod_base = OTHER; note = 2'-fluoro uridine
  modified_base 6: mod_base = OTHER; note = 2'O-methyl uridine
  modified_base 7: mod_base = OTHER; note = 2'O-methyl adenosine
  modified_base 8: mod_base = OTHER; note = 2'O-methyl guanosine
  modified_base 9: mod_base = OTHER; note = 2'-fluoro guanosine
  modified_base 10: mod_base = OTHER; note = 2'-fluoro adenosine
  modified_base 11: mod_base = OTHER; note = 2'-fluoro uridine
  modified_base 12: mod_base = OTHER; note = 2'O-methyl adenosine
  modified_base 13: mod_base = OTHER; note = 2'O-methyl adenosine
  modified_base 14: mod_base = OTHER; note = 2'-fluoro uridine
  modified_base 15: mod_base = OTHER; note = 2'O-methyl guanosine
  modified_base 16: mod_base = OTHER; note = 2'O-methyl uridine
  modified_base 17: mod_base = OTHER; note = 2'O-methyl cytidine
  modified_base 18: mod_base = OTHER; note = 2'O-methyl uridine
  modified_base 19: mod_base = OTHER; note = 2'-fluoro uridine
  modified_base 20: mod_base = OTHER; note = 2'O-methyl adenosine phosphorothioate
  modified_base 21: mod_base = OTHER; note = 2'O-methyl uridine
cccattaggataatgtcttat

SEQ ID NO: 1485 - RNA, 21 nt, synthetic construct
  source 1..21: mol_type = other RNA
  modified_base 1: mod_base = OTHER; note = 2'O-methyl cytidine phosphorothioate
  modified_base 2: mod_base = OTHER; note = 2'-fluoro guanosine phosphorothioate
  modified_base 3: mod_base = OTHER; note = 2'O-methyl cytidine
  modified_base 4: mod_base = OTHER; note = 2'-fluoro guanosine
  modified_base 5: mod_base = OTHER; note = 2'O-methyl cytidine
  modified_base 6: mod_base = OTHER; note = 2'-fluoro uridine
  modified_base 7: mod_base = OTHER; note = 2'O-methyl cytidine
  modified_base 8: mod_base = OTHER; note = 2'-fluoro uridine
  modified_base 9: mod_base = OTHER; note = 2'O-methyl guanosine
  modified_base 10: mod_base = OTHER; note = 2'-fluoro cytidine
  modified_base 11: mod_base = OTHER; note = 2'O-methyl guanosine
  modified_base 12: mod_base = OTHER; note = 2'-fluoro uridine
  modified_base 13: mod_base = OTHER; note = 2'O-methyl cytidine
  modified_base 14: mod_base = OTHER; note = 2'-fluoro guanosine
  modified_base 15: mod_base = OTHER; note = 2'O-methyl uridine
  modified_base 16: mod_base = OTHER; note = 2'-fluoro adenosine
  modified_base 17: mod_base = OTHER; note = 2'O-methyl cytidine
  modified_base 18: mod_base = OTHER; note = 2'-fluoro adenosine
  modified_base 19: mod_base = OTHER; note = 2'O-methyl uridine phosphorothioate
  modified_base 20: mod_base = OTHER; note = 2'O-methyl uridine phosphorothioate
  modified_base 21: mod_base = OTHER; note = 2'O-methyl uridine
cgcgctctgcgtcgtacattt

SEQ ID NO: 1486 - RNA, 21 nt, synthetic construct
  source 1..21: mol_type = other RNA
  modified_base 1: mod_base = OTHER; note = 2'O-methyl cytidine phosphorothioate
  modified_base 2: mod_base = OTHER; note = 2'-fluoro cytidine phosphorothioate
  modified_base 3: mod_base = OTHER; note = 2'O-methyl guanosine
  modified_base 4: mod_base = OTHER; note = 2'-fluoro cytidine
  modified_base 5: mod_base = OTHER; note = 2'O-methyl guanosine
  modified_base 6: mod_base = OTHER; note = 2'-fluoro cytidine
  modified_base 7: mod_base = OTHER; note = 2'O-methyl uridine
  modified_base 8: mod_base = OTHER; note = 2'-fluoro cytidine
  modified_base 9: mod_base = OTHER; note = 2'O-methyl uridine
  modified_base 10: mod_base = OTHER; note = 2'-fluoro guanosine
  modified_base 11: mod_base = OTHER; note = 2'O-methyl cytidine
  modified_base 12: mod_base = OTHER; note = 2'-fluoro guanosine
  modified_base 13: mod_base = OTHER; note = 2'O-methyl uridine
  modified_base 14: mod_base = OTHER; note = 2'-fluoro cytidine
  modified_base 15: mod_base = OTHER; note = 2'O-methyl guanosine
  modified_base 16: mod_base = OTHER; note = 2'-fluoro uridine
  modified_base 17: mod_base = OTHER; note = 2'O-methyl adenosine
  modified_base 18: mod_base = OTHER; note = 2'-fluoro cytidine
  modified_base 19: mod_base = OTHER; note = 2'O-methyl adenosine phosphorothioate
  modified_base 20: mod_base = OTHER; note = 2'O-methyl uridine phosphorothioate
  modified_base 21: mod_base = OTHER; note = 2'O-methyl uridine
ccgcgctctgcgtcgtacatt

SEQ ID NO: 1487 - RNA, 21 nt, synthetic construct
  source 1..21: mol_type = other RNA
  modified_base 1: mod_base = OTHER; note = 2'O-methyl guanosine phosphorothioate
  modified_base 2: mod_base = OTHER; note = 2'-fluoro cytidine phosphorothioate
  modified_base 3: mod_base = OTHER; note = 2'O-methyl cytidine
  modified_base 4: mod_base = OTHER; note = 2'-fluoro guanosine
  modified_base 5: mod_base = OTHER; note = 2'O-methyl cytidine
  modified_base 6: mod_base = OTHER; note = 2'-fluoro guanosine
  modified_base 7: mod_base = OTHER; note = 2'O-methyl cytidine
  modified_base 8: mod_base = OTHER; note = 2'-fluoro uridine
  modified_base 9: mod_base = OTHER; note = 2'O-methyl cytidine
  modified_base 10: mod_base = OTHER; note = 2'-fluoro uridine
  modified_base 11: mod_base = OTHER; note = 2'O-methyl guanosine
  modified_base 12: mod_base = OTHER; note = 2'-fluoro cytidine
  modified_base 13: mod_base = OTHER; note = 2'O-methyl guanosine
  modified_base 14: mod_base = OTHER; note = 2'-fluoro uridine
  modified_base 15: mod_base = OTHER; note = 2'O-methyl cytidine
  modified_base 16: mod_base = OTHER; note = 2'-fluoro guanosine
  modified_base 17: mod_base = OTHER; note = 2'O-methyl uridine
  modified_base 18: mod_base = OTHER; note = 2'-fluoro adenosine
  modified_base 19: mod_base = OTHER; note = 2'O-methyl cytidine phosphorothioate
  modified_base 20: mod_base = OTHER; note = 2'O-methyl uridine phosphorothioate
  modified_base 21: mod_base = OTHER; note = 2'O-methyl uridine
gccgcgctctgcgtcgtactt

SEQ ID NO: 1488 - RNA, 21 nt, synthetic construct
  source 1..21: mol_type = other RNA
  modified_base 1: mod_base = OTHER; note = 2'O-methyl cytidine phosphorothioate
  modified_base 2: mod_base = OTHER; note = 2'-fluoro adenosine phosphorothioate
  modified_base 3: mod_base = OTHER; note = 2'O-methyl guanosine
  modified_base 4: mod_base = OTHER; note = 2'-fluoro cytidine
  modified_base 5: mod_base = OTHER; note = 2'O-methyl cytidine
  modified_base 6: mod_base = OTHER; note = 2'-fluoro guanosine
  modified_base 7: mod_base = OTHER; note = 2'O-methyl cytidine
  modified_base 8: mod_base = OTHER; note = 2'-fluoro guanosine
  modified_base 9: mod_base = OTHER; note = 2'O-methyl cytidine
  modified_base 10: mod_base = OTHER; note = 2'-fluoro uridine
  modified_base 11: mod_base = OTHER; note = 2'O-methyl cytidine
  modified_base 12: mod_base = OTHER; note = 2'-fluoro uridine
  modified_base 13: mod_base = OTHER; note = 2'O-methyl guanosine
  modified_base 14: mod_base = OTHER; note = 2'-fluoro cytidine
  modified_base 15: mod_base = OTHER; note = 2'O-methyl guanosine
  modified_base 16: mod_base = OTHER; note = 2'-fluoro uridine
  modified_base 17: mod_base = OTHER; note = 2'O-methyl cytidine
  modified_base 18: mod_base = OTHER; note = 2'-fluoro guanosine
  modified_base 19: mod_base = OTHER; note = 2'O-methyl uridine phosphorothioate
  modified_base 20: mod_base = OTHER; note = 2'O-methyl uridine phosphorothioate
  modified_base 21: mod_base = OTHER; note = 2'O-methyl uridine
cagccgcgctctgcgtcgttt

SEQ ID NO: 1489 - RNA, 21 nt, synthetic construct
  source 1..21: mol_type = other RNA
  modified_base 1: mod_base = OTHER; note = 2'O-methyl cytidine phosphorothioate
  modified_base 2: mod_base = OTHER; note = 2'-fluoro cytidine phosphorothioate
  modified_base 3: mod_base = OTHER; note = 2'O-methyl adenosine
  modified_base 4: mod_base = OTHER; note = 2'-fluoro guanosine
  modified_base 5: mod_base = OTHER; note = 2'O-methyl cytidine
  modified_base 6: mod_base = OTHER; note = 2'-fluoro cytidine
  modified_base 7: mod_base = OTHER; note = 2'O-methyl guanosine
  modified_base 8: mod_base = OTHER; note = 2'-fluoro cytidine
  modified_base 9: mod_base = OTHER; note = 2'O-methyl guanosine
  modified_base 10: mod_base = OTHER; note = 2'-fluoro cytidine
  modified_base 11: mod_base = OTHER; note = 2'O-methyl uridine
  modified_base 12: mod_base = OTHER; note = 2'-fluoro cytidine
  modified_base 13: mod_base = OTHER; note = 2'O-methyl uridine
  modified_base 14: mod_base = OTHER; note = 2'-fluoro guanosine
  modified_base 15: mod_base = OTHER; note = 2'O-methyl cytidine
  modified_base 16: mod_base = OTHER; note = 2'-fluoro guanosine
  modified_base 17: mod_base = OTHER; note = 2'O-methyl uridine
  modified_base 18: mod_base = OTHER; note = 2'-fluoro cytidine
  modified_base 19: mod_base = OTHER; note = 2'O-methyl guanosine phosphorothioate
  modified_base 20: mod_base = OTHER; note = 2'O-methyl uridine phosphorothioate
  modified_base 21: mod_base = OTHER; note = 2'O-methyl uridine
ccagccgcgctctgcgtcgtt

SEQ ID NO: 1490 - RNA, 21 nt, synthetic construct
  source 1..21: mol_type = other RNA
  modified_base 1: mod_base = OTHER; note = 2'O-methyl uridine phosphorothioate
  modified_base 2: mod_base = OTHER; note = 2'-fluoro cytidine phosphorothioate
  modified_base 3: mod_base = OTHER; note = 2'O-methyl cytidine
  modified_base 4: mod_base = OTHER; note = 2'-fluoro adenosine
  modified_base 5: mod_base = OTHER; note = 2'O-methyl guanosine
  modified_base 6: mod_base = OTHER; note = 2'-fluoro cytidine
  modified_base 7: mod_base = OTHER; note = 2'O-methyl cytidine
  modified_base 8: mod_base = OTHER; note = 2'-fluoro guanosine
  modified_base 9: mod_base = OTHER; note = 2'O-methyl cytidine
  modified_base 10: mod_base = OTHER; note = 2'-fluoro guanosine
  modified_base 11: mod_base = OTHER; note = 2'O-methyl cytidine
  modified_base 12: mod_base = OTHER; note = 2'-fluoro uridine
  modified_base 13: mod_base = OTHER; note = 2'O-methyl cytidine
  modified_base 14: mod_base = OTHER; note = 2'-fluoro uridine
  modified_base 15: mod_base = OTHER; note = 2'O-methyl guanosine
  modified_base 16: mod_base = OTHER; note = 2'-fluoro cytidine
  modified_base 17: mod_base = OTHER; note = 2'O-methyl guanosine
  modified_base 18: mod_base = OTHER; note = 2'-fluoro uridine
  modified_base 19: mod_base = OTHER; note = 2'O-methyl cytidine phosphorothioate
  modified_base 20: mod_base = OTHER; note = 2'O-methyl uridine phosphorothioate
  modified_base 21: mod_base = OTHER; note = 2'O-methyl uridine
tccagccgcgctctgcgtctt

SEQ ID NO: 1491 - RNA, 21 nt, synthetic construct
  source 1..21: mol_type = other RNA
  modified_base 1: mod_base = OTHER; note = 2'O-methyl adenosine phosphorothioate
  modified_base 2: mod_base = OTHER; note = 2'-fluoro guanosine phosphorothioate
  modified_base 3: mod_base = OTHER; note = 2'O-methyl cytidine
  modified_base 4: mod_base = OTHER; note = 2'-fluoro uridine
  modified_base 5: mod_base = OTHER; note = 2'O-methyl cytidine
  modified_base 6: mod_base = OTHER; note = 2'-fluoro cytidine
  modified_base 7: mod_base = OTHER; note = 2'O-methyl adenosine
  modified_base 8: mod_base = OTHER; note = 2'-fluoro guanosine
  modified_base 9: mod_base = OTHER; note = 2'O-methyl cytidine
  modified_base 10: mod_base = OTHER; note = 2'-fluoro cytidine
  modified_base 11: mod_base = OTHER; note = 2'O-methyl guanosine
  modified_base 12: mod_base = OTHER; note = 2'-fluoro cytidine
  modified_base 13: mod_base = OTHER; note = 2'O-methyl guanosine
  modified_base 14: mod_base = OTHER; note = 2'-fluoro cytidine
  modified_base 15: mod_base = OTHER; note = 2'O-methyl uridine
  modified_base 16: mod_base = OTHER; note = 2'-fluoro cytidine
  modified_base 17: mod_base = OTHER; note = 2'O-methyl uridine
  modified_base 18: mod_base = OTHER; note = 2'-fluoro guanosine
  modified_base 19: mod_base = OTHER; note = 2'O-methyl cytidine phosphorothioate
  modified_base 20: mod_base = OTHER; note = 2'O-methyl uridine phosphorothioate
  modified_base 21: mod_base = OTHER; note = 2'O-methyl uridine
agctccagccgcgctctgctt

SEQ ID NO: 1492 - RNA, 21 nt, synthetic construct
  source 1..21: mol_type = other RNA
  modified_base 1: mod_base = OTHER; note = 2'O-methyl adenosine phosphorothioate
  modified_base 2: mod_base = OTHER; note = 2'-fluoro adenosine phosphorothioate
  modified_base 3: mod_base = OTHER; note = 2'O-methyl guanosine
  modified_base 4: mod_base = OTHER; note = 2'-fluoro cytidine
  modified_base 5: mod_base = OTHER; note = 2'O-methyl uridine
  modified_base 6: mod_base = OTHER; note = 2'-fluoro cytidine
  modified_base 7: mod_base = OTHER; note = 2'O-methyl cytidine
  modified_base 8: mod_base = OTHER; note = 2'-fluoro adenosine
  modified_base 9: mod_base = OTHER; note = 2'O-methyl guanosine
  modified_base 10: mod_base = OTHER; note = 2'-fluoro cytidine
  modified_base 11: mod_base = OTHER; note = 2'O-methyl cytidine
  modified_base 12: mod_base = OTHER; note = 2'-fluoro guanosine
  modified_base 13: mod_base = OTHER; note = 2'O-methyl cytidine
  modified_base 14: mod_base = OTHER; note = 2'-fluoro guanosine
  modified_base 15: mod_base = OTHER; note = 2'O-methyl cytidine
  modified_base 16: mod_base = OTHER; note = 2'-fluoro uridine
  modified_base 17: mod_base = OTHER; note = 2'O-methyl cytidine
  modified_base 18: mod_base = OTHER; note = 2'-fluoro uridine
  modified_base 19: mod_base = OTHER; note = 2'O-methyl guanosine phosphorothioate
  modified_base 20: mod_base = OTHER; note = 2'O-methyl uridine phosphorothioate
  modified_base 21: mod_base = OTHER; note = 2'O-methyl uridine
aagctccagccgcgctctgtt

SEQ ID NO: 1493 - RNA, 21 nt, synthetic construct
  source 1..21: mol_type = other RNA
  modified_base 1: mod_base = OTHER; note = 2'O-methyl cytidine phosphorothioate
  modified_base 2: mod_base = OTHER; note = 2'-fluoro adenosine phosphorothioate
  modified_base 3: mod_base = OTHER; note = 2'O-methyl adenosine
  modified_base 4: mod_base = OTHER; note = 2'-fluoro guanosine
  modified_base 5: mod_base = OTHER; note = 2'O-methyl cytidine
  modified_base 6: mod_base = OTHER; note = 2'-fluoro uridine
  modified_base 7: mod_base = OTHER; note = 2'O-methyl cytidine
  modified_base 8: mod_base = OTHER; note = 2'-fluoro cytidine
  modified_base 9: mod_base = OTHER; note = 2'O-methyl adenosine
  modified_base 10: mod_base = OTHER; note = 2'-fluoro guanosine
  modified_base 11: mod_base = OTHER; note = 2'O-methyl cytidine
  modified_base 12: mod_base = OTHER; note = 2'-fluoro cytidine
  modified_base 13: mod_base = OTHER; note = 2'O-methyl guanosine
  modified_base 14: mod_base = OTHER; note = 2'-fluoro cytidine
  modified_base 15: mod_base = OTHER; note = 2'O-methyl guanosine
  modified_base 16: mod_base = OTHER; note = 2'-fluoro cytidine
  modified_base 17: mod_base = OTHER; note = 2'O-methyl uridine
  modified_base 18: mod_base = OTHER; note = 2'-fluoro cytidine
  modified_base 19: mod_base = OTHER; note = 2'O-methyl uridine phosphorothioate
  modified_base 20: mod_base = OTHER; note = 2'O-methyl uridine phosphorothioate
  modified_base 21: mod_base = OTHER; note = 2'O-methyl uridine
caagctccagccgcgctcttt

SEQ ID NO: 1494 - RNA, 21 nt, synthetic construct
  source 1..21: mol_type = other RNA
  modified_base 1: mod_base = OTHER; note = 2'O-methyl adenosine phosphorothioate
  modified_base 2: mod_base = OTHER; note = 2'-fluoro cytidine phosphorothioate
  modified_base 3: mod_base = OTHER; note = 2'O-methyl adenosine
  modified_base 4: mod_base = OTHER; note = 2'-fluoro adenosine
  modified_base 5: mod_base = OTHER; note = 2'O-methyl guanosine
  modified_base 6: mod_base = OTHER; note = 2'-fluoro cytidine
  modified_base 7: mod_base = OTHER; note = 2'O-methyl uridine
  modified_base 8: mod_base = OTHER; note = 2'-fluoro cytidine
  modified_base 9: mod_base = OTHER; note = 2'O-methyl cytidine
  modified_base 10: mod_base = OTHER; note = 2'-fluoro adenosine
  modified_base 11: mod_base = OTHER; note = 2'O-methyl guanosine
  modified_base 12: mod_base = OTHER; note = 2'-fluoro cytidine
  modified_base 13: mod_base = OTHER; note = 2'O-methyl cytidine
  modified_base 14: mod_base = OTHER; note = 2'-fluoro guanosine
  modified_base 15: mod_base = OTHER; note = 2'O-methyl cytidine
  modified_base 16: mod_base = OTHER; note = 2'-fluoro guanosine
  modified_base 17: mod_base = OTHER; note = 2'O-methyl cytidine
  modified_base 18: mod_base = OTHER; note = 2'-fluoro uridine
  modified_base 19: mod_base = OTHER; note = 2'O-methyl cytidine phosphorothioate
  modified_base 20: mod_base = OTHER; note = 2'O-methyl uridine phosphorothioate
  modified_base 21: mod_base = OTHER; note = 2'O-methyl uridine
acaagctccagccgcgctctt

SEQ ID NO: 1495 - RNA, 21 nt, synthetic construct
  source 1..21: mol_type = other RNA
  modified_base 1: mod_base = OTHER; note = 2'O-methyl guanosine phosphorothioate
  modified_base 2: mod_base = OTHER; note = 2'-fluoro guanosine phosphorothioate
  modified_base 3: mod_base = OTHER; note = 2'O-methyl adenosine
  modified_base 4: mod_base = OTHER; note = 2'-fluoro cytidine
  modified_base 5: mod_base = OTHER; note = 2'O-methyl adenosine
  modified_base 6: mod_base = OTHER; note = 2'-fluoro adenosine
  modified_base 7: mod_base = OTHER; note = 2'O-methyl guanosine
  modified_base 8: mod_base = OTHER; note = 2'-fluoro cytidine
  modified_base 9: mod_base = OTHER; note = 2'O-methyl uridine
  modified_base 10: mod_base = OTHER; note = 2'-fluoro cytidine
  modified_base 11: mod_base = OTHER; note = 2'O-methyl cytidine
  modified_base 12: mod_base = OTHER; note = 2'-fluoro adenosine
  modified_base 13: mod_base = OTHER; note = 2'O-methyl guanosine
  modified_base 14: mod_base = OTHER; note = 2'-fluoro cytidine
  modified_base 15: mod_base = OTHER; note = 2'O-methyl cytidine
  modified_base 16: mod_base = OTHER; note = 2'-fluoro guanosine
  modified_base 17: mod_base = OTHER; note = 2'O-methyl cytidine
  modified_base 18: mod_base = OTHER; note = 2'-fluoro guanosine
  modified_base 19: mod_base = OTHER; note = 2'O-methyl cytidine phosphorothioate
  modified_base 20: mod_base = OTHER; note = 2'O-methyl uridine phosphorothioate
  modified_base 21: mod_base = OTHER; note = 2'O-methyl uridine
ggacaagctccagccgcgctt

SEQ ID NO: 1496 - RNA, 21 nt, synthetic construct
  source 1..21: mol_type = other RNA
  modified_base 1: mod_base = OTHER; note = 2'O-methyl adenosine phosphorothioate
  modified_base 2: mod_base = OTHER; note = 2'-fluoro guanosine phosphorothioate
  modified_base 3: mod_base = OTHER; note = 2'O-methyl guanosine
  modified_base 4: mod_base = OTHER; note = 2'-fluoro adenosine
  modified_base 5: mod_base = OTHER; note = 2'O-methyl cytidine
  modified_base 6: mod_base = OTHER; note = 2'-fluoro adenosine
  modified_base 7: mod_base = OTHER; note = 2'O-methyl adenosine
  modified_base 8: mod_base = OTHER; note = 2'-fluoro guanosine
  modified_base 9: mod_base = OTHER; note = 2'O-methyl cytidine
  modified_base 10: mod_base = OTHER; note = 2'-fluoro uridine
  modified_base 11: mod_base = OTHER; note = 2'O-methyl cytidine
  modified_base 12: mod_base = OTHER; note = 2'-fluoro cytidine
  modified_base 13: mod_base = OTHER; note = 2'O-methyl adenosine
  modified_base 14: mod_base = OTHER; note = 2'-fluoro guanosine
  modified_base 15: mod_base = OTHER; note = 2'O-methyl cytidine
  modified_base 16: mod_base = OTHER; note = 2'-fluoro cytidine
  modified_base 17: mod_base = OTHER; note = 2'O-methyl guanosine
  modified_base 18: mod_base = OTHER; note = 2'-fluoro cytidine
  modified_base 19: mod_base = OTHER; note = 2'O-methyl guanosine phosphorothioate
  modified_base 20: mod_base = OTHER; note = 2'O-methyl uridine phosphorothioate
  modified_base 21: mod_base = OTHER; note = 2'O-methyl uridine
aggacaagctccagccgcgtt

SEQ ID NO: 1497 - RNA, 21 nt, synthetic construct
  source 1..21: mol_type = other RNA
  modified_base 1: mod_base = OTHER; note = 2'O-methyl adenosine phosphorothioate
  modified_base 2: mod_base = OTHER; note = 2'-fluoro adenosine phosphorothioate
  modified_base 3: mod_base = OTHER; note = 2'O-methyl guanosine
  modified_base 4: mod_base = OTHER; note = 2'-fluoro guanosine
  modified_base 5: mod_base = OTHER; note = 2'O-methyl adenosine
  modified_base 6: mod_base = OTHER; note = 2'-fluoro cytidine
  modified_base 7: mod_base = OTHER; note = 2'O-methyl adenosine
  modified_base 8: mod_base = OTHER; note = 2'-fluoro adenosine
  modified_base 9: mod_base = OTHER; note = 2'O-methyl guanosine
  modified_base 10: mod_base = OTHER; note = 2'-fluoro cytidine
  modified_base 11: mod_base = OTHER; note = 2'O-methyl uridine
  modified_base 12: mod_base = OTHER; note = 2'-fluoro cytidine
  modified_base 13: mod_base = OTHER; note = 2'O-methyl cytidine
  modified_base 14: mod_base = OTHER; note = 2'-fluoro adenosine
  modified_base 15: mod_base = OTHER; note = 2'O-methyl guanosine
  modified_base 16: mod_base = OTHER; note = 2'-fluoro cytidine
  modified_base 17: mod_base = OTHER; note = 2'O-methyl cytidine
  modified_base 18: mod_base = OTHER; note = 2'-fluoro guanosine
  modified_base 19: mod_base = OTHER; note = 2'O-methyl cytidine phosphorothioate
  modified_base 20: mod_base = OTHER; note = 2'O-methyl uridine phosphorothioate
  modified_base 21: mod_base = OTHER; note = 2'O-methyl uridine
aaggacaagctccagccgctt

SEQ ID NO: 1498 - RNA, 21 nt, synthetic construct
  source 1..21: mol_type = other RNA
  modified_base 1: mod_base = OTHER; note = 2'O-methyl guanosine phosphorothioate
  modified_base 2: mod_base = OTHER; note = 2'-fluoro cytidine phosphorothioate
  modified_base 3: mod_base = OTHER; note = 2'O-methyl guanosine
  modified_base 4: mod_base = OTHER; note = 2'-fluoro adenosine
  modified_base 5: mod_base = OTHER; note = 2'O-methyl adenosine
  modified_base 6: mod_base = OTHER; note = 2'-fluoro guanosine
  modified_base 7: mod_base = OTHER; note = 2'O-methyl guanosine
  modified_base 8: mod_base = OTHER; note = 2'-fluoro adenosine
  modified_base 9: mod_base = OTHER; note = 2'O-methyl cytidine
  modified_base 10: mod_base = OTHER; note = 2'-fluoro adenosine
  modified_base 11: mod_base = OTHER; note = 2'O-methyl adenosine
  modified_base 12: mod_base = OTHER; note = 2'-fluoro guanosine
  modified_base 13: mod_base = OTHER; note = 2'O-methyl cytidine
  modified_base 14: mod_base = OTHER; note = 2'-fluoro uridine
  modified_base 15: mod_base = OTHER; note = 2'O-methyl cytidine
  modified_base 16: mod_base = OTHER; note = 2'-fluoro cytidine
  modified_base 17: mod_base = OTHER; note = 2'O-methyl adenosine
  modified_base 18: mod_base = OTHER; note = 2'-fluoro guanosine
  modified_base 19: mod_base = OTHER; note = 2'O-methyl cytidine phosphorothioate
  modified_base 20: mod_base = OTHER; note = 2'O-methyl uridine phosphorothioate
  modified_base 21: mod_base = OTHER; note = 2'O-methyl uridine
gcgaaggacaagctccagctt

SEQ ID NO: 1499 - RNA, 21 nt, synthetic construct
  source 1..21: mol_type = other RNA
  modified_base 1: mod_base = OTHER; note = 2'O-methyl cytidine phosphorothioate
  modified_base 2: mod_base = OTHER; note = 2'-fluoro cytidine phosphorothioate
  modified_base 3: mod_base = OTHER; note = 2'O-methyl guanosine
  modified_base 4: mod_base = OTHER; note = 2'-fluoro cytidine
  modified_base 5: mod_base = OTHER; note = 2'O-methyl guanosine
  modified_base 6: mod_base = OTHER; note = 2'-fluoro adenosine
  modified_base 7: mod_base = OTHER; note = 2'O-methyl adenosine
  modified_base 8: mod_base = OTHER; note = 2'-fluoro guanosine
  modified_base 9: mod_base = OTHER; note = 2'O-methyl guanosine
  modified_base 10: mod_base = OTHER; note = 2'-fluoro adenosine
  modified_base 11: mod_base = OTHER; note = 2'O-methyl cytidine
  modified_base 12: mod_base = OTHER; note = 2'-fluoro adenosine
  modified_base 13: mod_base = OTHER; note = 2'O-methyl adenosine
  modified_base 14: mod_base = OTHER; note = 2'-fluoro guanosine
  modified_base 15: mod_base = OTHER; note = 2'O-methyl cytidine
  modified_base 16: mod_base = OTHER; note = 2'-fluoro uridine
  modified_base 17: mod_base = OTHER; note = 2'O-methyl cytidine
  modified_base 18: mod_base = OTHER; note = 2'-fluoro cytidine
  modified_base 19: mod_base = OTHER; note = 2'O-methyl adenosine phosphorothioate
  modified_base 20: mod_base = OTHER; note = 2'O-methyl uridine phosphorothioate
  modified_base 21: mod_base = OTHER; note = 2'O-methyl uridine
ccgcgaaggacaagctccatt

SEQ ID NO: 1500 - RNA, 21 nt, synthetic construct
  source 1..21: mol_type = other RNA
  modified_base 1: mod_base = OTHER; note = 2'O-methyl cytidine phosphorothioate
  modified_base 2: mod_base = OTHER; note = 2'-fluoro cytidine phosphorothioate
  modified_base 3: mod_base = OTHER; note = 2'O-methyl cytidine
  modified_base 4: mod_base = OTHER; note = 2'-fluoro guanosine
  modified_base 5: mod_base = OTHER; note = 2'O-methyl cytidine
  modified_base 6: mod_base = OTHER; note = 2'-fluoro guanosine
  modified_base 7: mod_base = OTHER; note = 2'O-methyl adenosine
  modified_base 8: mod_base = OTHER; note = 2'-fluoro adenosine
  modified_base 9: mod_base = OTHER; note = 2'O-methyl guanosine
  modified_base 10: mod_base = OTHER; note = 2'-fluoro guanosine
  modified_base 11: mod_base = OTHER; note = 2'O-methyl adenosine
  modified_base 12: mod_base = OTHER; note = 2'-fluoro cytidine
  modified_base 13: mod_base = OTHER; note = 2'O-methyl adenosine
  modified_base 14: mod_base = OTHER; note = 2'-fluoro adenosine
  modified_base 15: mod_base = OTHER; note = 2'O-methyl guanosine
  modified_base 16: mod_base = OTHER; note = 2'-fluoro cytidine
  modified_base 17: mod_base = OTHER; note = 2'O-methyl uridine
  modified_base 18: mod_base = OTHER; note = 2'-fluoro cytidine
  modified_base 19: mod_base = OTHER; note = 2'O-methyl cytidine phosphorothioate
  modified_base 20: mod_base = OTHER; note = 2'O-methyl uridine phosphorothioate
  modified_base 21: mod_base = OTHER; note = 2'O-methyl uridine
cccgcgaaggacaagctcctt

SEQ ID NO: 1501 - RNA, 21 nt, synthetic construct
  source 1..21: mol_type = other RNA
  modified_base 1: mod_base = OTHER; note = 2'O-methyl guanosine phosphorothioate
  modified_base 2: mod_base = OTHER; note = 2'-fluoro cytidine phosphorothioate
  modified_base 3: mod_base = OTHER; note = 2'O-methyl cytidine
  modified_base 4: mod_base = OTHER; note = 2'-fluoro cytidine
  modified_base 5: mod_base = OTHER; note = 2'O-methyl guanosine
  modified_base 6: mod_base = OTHER; note = 2'-fluoro cytidine
  modified_base 7: mod_base = OTHER; note = 2'O-methyl guanosine
  modified_base 8: mod_base = OTHER; note = 2'-fluoro adenosine
  modified_base 9: mod_base = OTHER; note = 2'O-methyl adenosine
  modified_base 10: mod_base = OTHER; note = 2'-fluoro guanosine
  modified_base 11: mod_base = OTHER; note = 2'O-methyl guanosine
  modified_base 12: mod_base = OTHER; note = 2'-fluoro adenosine
  modified_base 13: mod_base = OTHER; note = 2'O-methyl cytidine
  modified_base 14: mod_base = OTHER; note = 2'-fluoro adenosine
  modified_base 15: mod_base = OTHER; note = 2'O-methyl adenosine
  modified_base 16: mod_base = OTHER; note = 2'-fluoro guanosine
  modified_base 17: mod_base = OTHER; note = 2'O-methyl cytidine
  modified_base 18: mod_base = OTHER; note = 2'-fluoro uridine
  modified_base 19: mod_base = OTHER; note = 2'O-methyl cytidine phosphorothioate
  modified_base 20: mod_base = OTHER; note = 2'O-methyl uridine phosphorothioate
  modified_base 21: mod_base = OTHER; note = 2'O-methyl uridine
gcccgcgaaggacaagctctt

SEQ ID NO: 1502 - RNA, 21 nt, synthetic construct
  source 1..21: mol_type = other RNA
  modified_base 1: mod_base = OTHER; note = 2'O-methyl adenosine phosphorothioate
  modified_base 2: mod_base = OTHER; note = 2'-fluoro guanosine phosphorothioate
  modified_base 3: mod_base = OTHER; note = 2'O-methyl cytidine
  modified_base 4: mod_base = OTHER; note = 2'-fluoro cytidine
  modified_base 5: mod_base = OTHER; note = 2'O-methyl cytidine
  modified_base 6: mod_base = OTHER; note = 2'-fluoro guanosine
  modified_base 7: mod_base = OTHER; note = 2'O-methyl cytidine
  modified_base 8: mod_base = OTHER; note = 2'-fluoro guanosine
  modified_base 9: mod_base = OTHER; note = 2'O-methyl adenosine
  modified_base 10: mod_base = OTHER; note = 2'-fluoro adenosine
  modified_base 11: mod_base = OTHER; note = 2'O-methyl guanosine
  modified_base 12: mod_base = OTHER; note = 2'-fluoro guanosine
  modified_base 13: mod_base = OTHER; note = 2'O-methyl adenosine
  modified_base 14: mod_base = OTHER; note = 2'-fluoro cytidine
  modified_base 15: mod_base = OTHER; note = 2'O-methyl adenosine
  modified_base 16: mod_base = OTHER; note = 2'-fluoro adenosine
  modified_base 17: mod_base = OTHER; note = 2'O-methyl guanosine
  modified_base 18: mod_base = OTHER; note = 2'-fluoro cytidine
  modified_base 19: mod_base = OTHER; note = 2'O-methyl uridine phosphorothioate
  modified_base 20: mod_base = OTHER; note = 2'O-methyl uridine phosphorothioate
  modified_base 21: mod_base = OTHER; note = 2'O-methyl uridine
agcccgcgaaggacaagcttt

SEQ ID NO: 1503 - RNA, 21 nt, synthetic construct
  source 1..21: mol_type = other RNA
  modified_base 1: mod_base = OTHER; note = 2'O-methyl guanosine phosphorothioate
  modified_base 2: mod_base = OTHER; note = 2'-fluoro cytidine phosphorothioate
  modified_base 3: mod_base = OTHER; note = 2'O-methyl cytidine
  modified_base 4: mod_base = OTHER; note = 2'-fluoro guanosine
  modified_base 5: mod_base = OTHER; note = 2'O-methyl cytidine
  modified_base 6: mod_base = OTHER; note = 2'-fluoro adenosine
  modified_base 7: mod_base = OTHER; note = 2'O-methyl guanosine
  modified_base 8: mod_base = OTHER; note = 2'-fluoro cytidine
  modified_base 9: mod_base = OTHER; note = 2'O-methyl cytidine
  modified_base 10: mod_base = OTHER; note = 2'-fluoro cytidine
  modified_base 11: mod_base = OTHER; note = 2'O-methyl guanosine
  modified_base 12: mod_base = OTHER; note = 2'-fluoro cytidine
  modified_base 13: mod_base = OTHER; note = 2'O-methyl guanosine
  modified_base 14: mod_base = OTHER; note = 2'-fluoro adenosine
  modified_base 15: mod_base = OTHER; note = 2'O-methyl adenosine
  modified_base 16: mod_base = OTHER; note = 2'-fluoro guanosine
  modified_base 17: mod_base = OTHER; note = 2'O-methyl guanosine
  modified_base 18: mod_base = OTHER; note = 2'-fluoro adenosine
  modified_base 19: mod_base = OTHER; note = 2'O-methyl cytidine phosphorothioate
  modified_base 20: mod_base = OTHER; note = 2'O-methyl uridine phosphorothioate
  modified_base 21: mod_base = OTHER; note = 2'O-methyl uridine
gccgcagcccgcgaaggactt

SEQ ID NO: 1504 - RNA, 21 nt, synthetic construct
  source 1..21: mol_type = other RNA
  modified_base 1: mod_base = OTHER; note = 2'O-methyl adenosine phosphorothioate
  modified_base 2: mod_base = OTHER; note = 2'-fluoro adenosine phosphorothioate
  modified_base 3: mod_base = OTHER; note = 2'O-methyl guanosine
  modified_base 4: mod_base = OTHER; note = 2'-fluoro cytidine
  modified_base 5: mod_base = OTHER; note = 2'O-methyl cytidine
  modified_base 6: mod_base = OTHER; note = 2'-fluoro cytidine
  modified_base 7: mod_base = OTHER; note = 2'O-methyl adenosine
  modified_base 8: mod_base = OTHER; note = 2'-fluoro guanosine
  modified_base 9: mod_base = OTHER; note = 2'O-methyl guanosine
  modified_base 10: mod_base = OTHER; note = 2'-fluoro adenosine
  modified_base 11: mod_base = OTHER; note = 2'O-methyl adenosine
  modified_base 12: mod_base = OTHER; note = 2'-fluoro guanosine
  modified_base 13: mod_base = OTHER; note = 2'O-methyl cytidine
  modified_base 14: mod_base = OTHER; note = 2'-fluoro cytidine
  modified_base 15: mod_base = OTHER; note = 2'O-methyl guanosine
  modified_base 16: mod_base = OTHER; note = 2'-fluoro cytidine
  modified_base 17: mod_base = OTHER; note = 2'O-methyl adenosine
  modified_base 18: mod_base = OTHER; note = 2'-fluoro guanosine
  modified_base 19: mod_base = OTHER; note = 2'O-methyl cytidine phosphorothioate
  modified_base 20: mod_base = OTHER; note = 2'O-methyl uridine phosphorothioate
  modified_base 21: mod_base = OTHER; note = 2'O-methyl uridine
aagcccaggaagccgcagctt

SEQ ID NO: 1505 - RNA, 21 nt, synthetic construct
  source 1..21: mol_type = other RNA
  modified_base 1: mod_base = OTHER; note = 2'O-methyl guanosine phosphorothioate
  modified_base 2: mod_base = OTHER; note = 2'-fluoro adenosine phosphorothioate
  modified_base 3: mod_base = OTHER; note = 2'O-methyl adenosine
  modified_base 4: mod_base = OTHER; note = 2'-fluoro guanosine
  modified_base 5: mod_base = OTHER; note = 2'O-methyl cytidine
  modified_base 6: mod_base = OTHER; note = 2'-fluoro cytidine
  modified_base 7: mod_base = OTHER; note = 2'O-methyl cytidine
  modified_base 8: mod_base = OTHER; note = 2'-fluoro adenosine
  modified_base 9: mod_base = OTHER; note = 2'O-methyl guanosine
  modified_base 10: mod_base = OTHER; note = 2'-fluoro guanosine
  modified_base 11: mod_base = OTHER; note = 2'O-methyl adenosine
  modified_base 12: mod_base = OTHER; note = 2'-fluoro adenosine
  modified_base 13: mod_base = OTHER; note = 2'O-methyl guanosine
  modified_base 14: mod_base = OTHER; note = 2'-fluoro cytidine
  modified_base 15: mod_base = OTHER; note = 2'O-methyl cytidine
  modified_base 16: mod_base = OTHER; note = 2'-fluoro guanosine
  modified_base 17: mod_base = OTHER; note = 2'O-methyl cytidine
  modified_base 18: mod_base = OTHER; note = 2'-fluoro adenosine
  modified_base 19: mod_base = OTHER; note = 2'O-methyl guanosine phosphorothioate
  modified_base 20: mod_base = OTHER; note = 2'O-methyl uridine phosphorothioate
  modified_base 21: mod_base = OTHER; note = 2'O-methyl uridine
gaagcccaggaagccgcagtt

SEQ ID NO: 1506 - RNA, 21 nt, synthetic construct
  source 1..21: mol_type = other RNA
  modified_base 1: mod_base = OTHER; note = 2'O-methyl guanosine phosphorothioate
  modified_base 2: mod_base = OTHER; note = 2'-fluoro uridine phosphorothioate
  modified_base 3: mod_base = OTHER; note = 2'O-methyl adenosine
  modified_base 4: mod_base = OTHER; note = 2'-fluoro guanosine
  modified_base 5: mod_base = OTHER; note = 2'O-methyl adenosine
  modified_base 6: mod_base = OTHER; note = 2'-fluoro adenosine
  modified_base 7: mod_base = OTHER; note = 2'O-methyl guanosine
  modified_base 8: mod_base = OTHER; note = 2'-fluoro cytidine
  modified_base 9: mod_base = OTHER; note = 2'O-methyl cytidine
  modified_base 10: mod_base = OTHER; note = 2'-fluoro cytidine
  modified_base 11: mod_base = OTHER; note = 2'O-methyl adenosine
  modified_base 12: mod_base = OTHER; note = 2'-fluoro guanosine
  modified_base 13: mod_base = OTHER; note = 2'O-methyl guanosine
  modified_base 14: mod_base = OTHER; note = 2'-fluoro adenosine
  modified_base 15: mod_base = OTHER; note = 2'O-methyl adenosine
  modified_base 16: mod_base = OTHER; note = 2'-fluoro guanosine
  modified_base 17: mod_base = OTHER; note = 2'O-methyl cytidine
  modified_base 18: mod_base = OTHER; note = 2'-fluoro cytidine
  modified_base 19: mod_base = OTHER; note = 2'O-methyl guanosine phosphorothioate
  modified_base 20: mod_base = OTHER; note = 2'O-methyl uridine phosphorothioate
  modified_base 21: mod_base = OTHER; note = 2'O-methyl uridine
gtagaagcccaggaagccgtt

SEQ ID NO: 1507 - RNA, 21 nt, synthetic construct
  source 1..21: mol_type = other RNA
  modified_base 1: mod_base = OTHER; note = 2'O-methyl cytidine phosphorothioate
  modified_base 2: mod_base = OTHER; note = 2'-fluoro guanosine phosphorothioate
  modified_base 3: mod_base = OTHER; note = 2'O-methyl adenosine
  modified_base 4: mod_base = OTHER; note = 2'-fluoro cytidine
  modified_base 5: mod_base = OTHER; note = 2'O-methyl guanosine
  modified_base 6: mod_base = OTHER; note = 2'-fluoro uridine
  modified_base 7: mod_base = OTHER; note = 2'O-methyl guanosine
  modified_base 8: mod_base = OTHER; note = 2'-fluoro guanosine
  modified_base 9: mod_base = OTHER; note = 2'O-methyl uridine
  modified_base 10: mod_base = OTHER; note = 2'-fluoro adenosine
  modified_base 11: mod_base = OTHER; note = 2'O-methyl guanosine
  modified_base 12: mod_base = OTHER; note = 2'-fluoro adenosine
  modified_base 13: mod_base = OTHER; note = 2'O-methyl adenosine
  modified_base 14: mod_base = OTHER; note = 2'-fluoro guanosine
  modified_base 15: mod_base = OTHER; note = 2'O-methyl cytidine
  modified_base 16: mod_base = OTHER; note = 2'-fluoro cytidine
  modified_base 17: mod_base = OTHER; note = 2'O-methyl cytidine
  modified_base 18: mod_base = OTHER; note = 2'-fluoro adenosine
  modified_base 19: mod_base = OTHER; note = 2'O-methyl guanosine phosphorothioate
  modified_base 20: mod_base = OTHER; note = 2'O-methyl uridine phosphorothioate
  modified_base 21: mod_base = OTHER; note = 2'O-methyl uridine
cgacgtggtagaagcccagtt

SEQ ID NO: 1508 - RNA, 21 nt, synthetic construct
  source 1..21: mol_type = other RNA
  modified_base 1: mod_base = OTHER; note = 2'O-methyl cytidine phosphorothioate
  modified_base 2: mod_base = OTHER; note = 2'-fluoro cytidine phosphorothioate
  modified_base 3: mod_base = OTHER; note = 2'O-methyl guanosine
  modified_base 4: mod_base = OTHER; note = 2'-fluoro adenosine
  modified_base 5: mod_base = OTHER; note = 2'O-methyl cytidine
  modified_base 6: mod_base = OTHER; note = 2'-fluoro guanosine
  modified_base 7: mod_base = OTHER; note = 2'O-methyl uridine
  modified_base 8: mod_base = OTHER; note = 2'-fluoro guanosine
  modified_base 9: mod_base = OTHER; note = 2'O-methyl guanosine
  modified_base 10: mod_base = OTHER; note = 2'-fluoro uridine
  modified_base 11: mod_base = OTHER; note = 2'O-methyl adenosine
  modified_base 12: mod_base = OTHER; note = 2'-fluoro guanosine
  modified_base 13: mod_base = OTHER; note = 2'O-methyl adenosine
  modified_base 14: mod_base = OTHER; note = 2'-fluoro adenosine
  modified_base 15: mod_base = OTHER; note = 2'O-methyl guanosine
  modified_base 16: mod_base = OTHER; note = 2'-fluoro cytidine
  modified_base 17: mod_base = OTHER; note = 2'O-methyl cytidine
  modified_base 18: mod_base = OTHER; note = 2'-fluoro cytidine
  modified_base 19: mod_base = OTHER; note = 2'O-methyl adenosine phosphorothioate
  modified_base 20: mod_base = OTHER; note = 2'O-methyl uridine phosphorothioate
  modified_base 21: mod_base = OTHER; note = 2'O-methyl uridine
ccgacgtggtagaagcccatt

SEQ ID NO: 1509 - RNA, 21 nt, synthetic construct
  source 1..21: mol_type = other RNA
  modified_base 1: mod_base = OTHER; note = 2'O-methyl cytidine phosphorothioate
  modified_base 2: mod_base = OTHER; note = 2'-fluoro cytidine phosphorothioate
  modified_base 3: mod_base = OTHER; note = 2'O-methyl cytidine
  modified_base 4: mod_base = OTHER; note = 2'-fluoro cytidine
  modified_base 5: mod_base = OTHER; note = 2'O-methyl guanosine
  modified_base 6: mod_base = OTHER; note = 2'-fluoro adenosine
  modified_base 7: mod_base = OTHER; note = 2'O-methyl cytidine
  modified_base 8: mod_base = OTHER; note = 2'-fluoro guanosine
  modified_base 9: mod_base = OTHER; note = 2'O-methyl uridine
  modified_base 10: mod_base = OTHER; note = 2'-fluoro guanosine
  modified_base 11: mod_base = OTHER; note = 2'O-methyl guanosine
  modified_base 12: mod_base = OTHER; note = 2'-fluoro uridine
  modified_base 13: mod_base = OTHER; note = 2'O-methyl adenosine
  modified_base 14: mod_base = OTHER; note = 2'-fluoro guanosine
  modified_base 15: mod_base = OTHER; note = 2'O-methyl adenosine
  modified_base 16: mod_base = OTHER; note = 2'-fluoro adenosine
  modified_base 17: mod_base = OTHER; note = 2'O-methyl guanosine
  modified_base 18: mod_base = OTHER; note = 2'-fluoro cytidine
  modified_base 19: mod_base = OTHER; note = 2'O-methyl cytidine phosphorothioate
  modified_base 20: mod_base = OTHER; note = 2'O-methyl uridine phosphorothioate
  modified_base 21: mod_base = OTHER; note = 2'O-methyl uridine
ccccgacgtggtagaagcctt

SEQ ID NO: 1510 - RNA, 21 nt, synthetic construct
  source 1..21: mol_type = other RNA
  modified_base 1: mod_base = OTHER; note = 2'O-methyl guanosine phosphorothioate
  modified_base 2: mod_base = OTHER; note = 2'-fluoro cytidine phosphorothioate
  modified_base 3: mod_base = OTHER; note = 2'O-methyl cytidine
  modified_base 4: mod_base = OTHER; note = 2'-fluoro cytidine
  modified_base 5: mod_base = OTHER; note = 2'O-methyl cytidine
  modified_base 6: mod_base = OTHER; note = 2'-fluoro guanosine
  modified_base 7: mod_base = OTHER; note = 2'O-methyl adenosine
  modified_base 8: mod_base = OTHER; note = 2'-fluoro cytidine
  modified_base 9: mod_base = OTHER; note = 2'O-methyl guanosine
  modified_base 10: mod_base = OTHER; note = 2'-fluoro uridine
  modified_base 11: mod_base = OTHER; note = 2'O-methyl guanosine
  modified_base 12: mod_base = OTHER; note = 2'-fluoro guanosine
  modified_base 13: mod_base = OTHER; note = 2'O-methyl uridine
  modified_base 14: mod_base = OTHER; note = 2'-fluoro adenosine
  modified_base 15: mod_base = OTHER; note = 2'O-methyl guanosine
  modified_base 16: mod_base = OTHER; note = 2'-fluoro adenosine
  modified_base 17: mod_base = OTHER; note = 2'O-methyl adenosine
  modified_base 18: mod_base = OTHER; note = 2'-fluoro guanosine
  modified_base 19: mod_base = OTHER; note = 2'O-methyl cytidine phosphorothioate
  modified_base 20: mod_base = OTHER; note = 2'O-methyl uridine phosphorothioate
  modified_base 21: mod_base = OTHER; note = 2'O-methyl uridine
gccccgacgtggtagaagctt

SEQ ID NO: 1511 - RNA, 21 nt, synthetic construct
  source 1..21: mol_type = other RNA
  modified_base 1: mod_base = OTHER; note = 2'O-methyl cytidine phosphorothioate
  modified_base 2: mod_base = OTHER; note = 2'-fluoro guanosine phosphorothioate
  modified_base 3: mod_base = OTHER; note = 2'O-methyl cytidine
  modified_base 4: mod_base = OTHER; note = 2'-fluoro cytidine
  modified_base 5: mod_base = OTHER; note = 2'O-methyl cytidine
  modified_base 6: mod_base = OTHER; note = 2'-fluoro cytidine
  modified_base 7: mod_base = OTHER; note = 2'O-methyl guanosine
  modified_base 8: mod_base = OTHER; note = 2'-fluoro adenosine
  modified_base 9: mod_base = OTHER; note = 2'O-methyl cytidine
  modified_base 10: mod_base = OTHER; note = 2'-fluoro guanosine
  modified_base 11: mod_base = OTHER; note = 2'O-methyl uridine
  modified_base 12: mod_base = OTHER; note = 2'-fluoro guanosine
  modified_base 13: mod_base = OTHER; note = 2'O-methyl guanosine
  modified_base 14: mod_base = OTHER; note = 2'-fluoro uridine
  modified_base 15: mod_base = OTHER; note = 2'O-methyl adenosine
  modified_base 16: mod_base = OTHER; note = 2'-fluoro guanosine
  modified_base 17: mod_base = OTHER; note = 2'O-methyl adenosine
  modified_base 18: mod_base = OTHER; note = 2'-fluoro adenosine
  modified_base 19: mod_base = OTHER; note = 2'O-methyl guanosine phosphorothioate
  modified_base 20: mod_base = OTHER; note = 2'O-methyl uridine phosphorothioate
  modified_base 21: mod_base = OTHER; note = 2'O-methyl uridine
cgccccgacgtggtagaagtt

SEQ ID NO: 1512 - RNA, 21 nt, synthetic construct
  source 1..21: mol_type = other RNA
  modified_base 1: mod_base = OTHER; note = 2'O-methyl uridine phosphorothioate
  modified_base 2: mod_base = OTHER; note = 2'-fluoro cytidine phosphorothioate
  modified_base 3: mod_base = OTHER; note = 2'O-methyl guanosine
  modified_base 4: mod_base = OTHER; note = 2'-fluoro cytidine
  modified_base 5: mod_base = OTHER; note = 2'O-methyl cytidine
  modified_base 6: mod_base = OTHER; note = 2'-fluoro cytidine
  modified_base 7: mod_base = OTHER; note = 2'O-methyl cytidine
  modified_base 8: mod_base = OTHER; note = 2'-fluoro guanosine
  modified_base 9: mod_base = OTHER; note = 2'O-methyl adenosine
  modified_base 10: mod_base = OTHER; note = 2'-fluoro cytidine
  modified_base 11: mod_base = OTHER; note = 2'O-methyl guanosine
  modified_base 12: mod_base = OTHER; note = 2'-fluoro uridine
  modified_base 13: mod_base = OTHER; note = 2'O-methyl guanosine
  modified_base 14: mod_base = OTHER; note = 2'-fluoro guanosine
  modified_base 15: mod_base = OTHER; note = 2'O-methyl uridine
  modified_base 16: mod_base = OTHER; note = 2'-fluoro adenosine
  modified_base 17: mod_base = OTHER; note = 2'O-methyl guanosine
  modified_base 18: mod_base = OTHER; note = 2'-fluoro adenosine
  modified_base 19: mod_base = OTHER; note = 2'O-methyl adenosine phosphorothioate
  modified_base 20: mod_base = OTHER; note = 2'O-methyl uridine phosphorothioate
  modified_base 21: mod_base = OTHER; note = 2'O-methyl uridine
tcgccccgacgtggtagaatt

SEQ ID NO: 1513 - RNA, 21 nt, synthetic construct
  source 1..21: mol_type = other RNA
  modified_base 1: mod_base = OTHER; note = 2'O-methyl guanosine phosphorothioate
  modified_base 2: mod_base = OTHER; note = 2'-fluoro uridine phosphorothioate
  modified_base 3: mod_base = OTHER; note = 2'O-methyl cytidine
  modified_base 4: mod_base = OTHER; note = 2'-fluoro guanosine
  modified_base 5: mod_base = OTHER; note = 2'O-methyl cytidine
  modified_base 6: mod_base = OTHER; note = 2'-fluoro cytidine
  modified_base 7: mod_base = OTHER; note = 2'O-methyl cytidine
  modified_base 8: mod_base = OTHER; note = 2'-fluoro cytidine
  modified_base 9: mod_base = OTHER; note = 2'O-methyl guanosine
  modified_base 10: mod_base = OTHER; note = 2'-fluoro adenosine
  modified_base 11: mod_base = OTHER; note = 2'O-methyl cytidine
  modified_base 12: mod_base = OTHER; note = 2'-fluoro guanosine
  modified_base 13: mod_base = OTHER; note = 2'O-methyl uridine
  modified_base 14: mod_base = OTHER; note = 2'-fluoro guanosine
  modified_base 15: mod_base = OTHER; note = 2'O-methyl guanosine
  modified_base 16: mod_base = OTHER; note = 2'-fluoro uridine
  modified_base 17: mod_base = OTHER; note = 2'O-methyl adenosine
  modified_base 18: mod_base = OTHER; note = 2'-fluoro guanosine
  modified_base 19: mod_base = OTHER; note = 2'O-methyl adenosine phosphorothioate
  modified_base 20: mod_base = OTHER; note = 2'O-methyl uridine phosphorothioate
  modified_base 21: mod_base = OTHER; note = 2'O-methyl uridine
gtcgccccgacgtggtagatt

SEQ ID NO: 1514 - RNA, 21 nt, synthetic construct
  source 1..21: mol_type = other RNA
  modified_base 1: mod_base = OTHER; note = 2'O-methyl guanosine phosphorothioate
  modified_base 2: mod_base = OTHER; note = 2'-fluoro guanosine phosphorothioate
  modified_base 3: mod_base = OTHER; note = 2'O-methyl uridine
  modified_base 4: mod_base = OTHER; note = 2'-fluoro cytidine
  modified_base 5: mod_base = OTHER; note = 2'O-methyl guanosine
  modified_base 6: mod_base = OTHER; note = 2'-fluoro cytidine
  modified_base 7: mod_base = OTHER; note = 2'O-methyl cytidine
  modified_base 8: mod_base = OTHER; note = 2'-fluoro cytidine
  modified_base 9: mod_base = OTHER; note = 2'O-methyl cytidine
  modified_base 10: mod_base = OTHER; note = 2'-fluoro guanosine
  modified_base 11: mod_base = OTHER; note = 2'O-methyl adenosine
  modified_base 12: mod_base = OTHER; note = 2'-fluoro cytidine
  modified_base 13: mod_base = OTHER; note = 2'O-methyl guanosine
  modified_base 14: mod_base = OTHER; note = 2'-fluoro uridine
  modified_base 15: mod_base = OTHER; note = 2'O-methyl guanosine
  modified_base 16: mod_base = OTHER; note = 2'-fluoro guanosine
  modified_base 17: mod_base = OTHER; note = 2'O-methyl uridine
  modified_base 18: mod_base = OTHER; note = 2'-fluoro adenosine
  modified_base 19: mod_base = OTHER; note = 2'O-methyl guanosine phosphorothioate
  modified_base 20: mod_base = OTHER; note = 2'O-methyl uridine phosphorothioate
  modified_base 21: mod_base = OTHER; note = 2'O-methyl uridine
ggtcgccccgacgtggtagtt

SEQ ID NO: 1515 - RNA, 21 nt, synthetic construct
  source 1..21: mol_type = other RNA
  modified_base 1: mod_base = OTHER; note = 2'O-methyl cytidine phosphorothioate
  modified_base 2: mod_base = OTHER; note = 2'-fluoro guanosine phosphorothioate
  modified_base 3: mod_base = OTHER; note = 2'O-methyl guanosine
  modified_base 4: mod_base = OTHER; note = 2'-fluoro guanosine
  modified_base 5: mod_base = OTHER; note = 2'O-methyl uridine
  modified_base 6: mod_base = OTHER; note = 2'-fluoro cytidine
  modified_base 7: mod_base = OTHER; note = 2'O-methyl guanosine
  modified_base 8: mod_base = OTHER; note = 2'-fluoro cytidine
  modified_base 9: mod_base = OTHER; note = 2'O-methyl cytidine
  modified_base 10: mod_base = OTHER; note = 2'-fluoro cytidine
  modified_base 11: mod_base = OTHER; note = 2'O-methyl cytidine
  modified_base 12: mod_base = OTHER; note = 2'-fluoro guanosine
  modified_base 13: mod_base = OTHER; note = 2'O-methyl adenosine
  modified_base 14: mod_base = OTHER; note = 2'-fluoro cytidine
  modified_base 15: mod_base = OTHER; note = 2'O-methyl guanosine
  modified_base 16: mod_base = OTHER; note = 2'-fluoro uridine
  modified_base 17: mod_base = OTHER; note = 2'O-methyl guanosine
  modified_base 18: mod_base = OTHER; note = 2'-fluoro guanosine
  modified_base 19: mod_base = OTHER; note = 2'O-methyl uridine phosphorothioate
  modified_base 20: mod_base = OTHER; note = 2'O-methyl uridine phosphorothioate
  modified_base 21: mod_base = OTHER; note = 2'O-methyl uridine
cgggtcgccccgacgtggttt

SEQ ID NO: 1516 - RNA, 21 nt, synthetic construct
  source 1..21: mol_type = other RNA
  modified_base 1: mod_base = OTHER; note = 2'O-methyl guanosine phosphorothioate
  modified_base 2: mod_base = OTHER; note = 2'-fluoro guanosine phosphorothioate
  modified_base 3: mod_base = OTHER; note = 2'O-methyl cytidine
  modified_base 4: mod_base = OTHER; note = 2'-fluoro guanosine
  modified_base 5: mod_base = OTHER; note = 2'O-methyl uridine
  modified_base 6: mod_base = OTHER; note = 2'-fluoro guanosine
  modified_base 7: mod_base = OTHER; note = 2'O-methyl cytidine
  modified_base 8: mod_base = OTHER; note = 2'-fluoro uridine
  modified_base 9: mod_base = OTHER; note = 2'O-methyl cytidine
  modified_base 10: mod_base = OTHER; note = 2'-fluoro guanosine
  modified_base 11: mod_base = OTHER; note = 2'O-methyl cytidine
  modified_base 12: mod_base = OTHER; note = 2'-fluoro uridine
  modified_base 13: mod_base = OTHER; note = 2'O-methyl cytidine
  modified_base 14: mod_base = OTHER; note = 2'-fluoro adenosine
  modified_base 15: mod_base = OTHER; note = 2'O-methyl guanosine
  modified_base 16: mod_base = OTHER; note = 2'-fluoro guanosine
  modified_base 17: mod_base = OTHER; note = 2'O-methyl cytidine
  modified_base 18: mod_base = OTHER; note = 2'-fluoro adenosine
  modified_base 19: mod_base = OTHER; note = 2'O-methyl guanosine phosphorothioate
  modified_base 20: mod_base = OTHER; note = 2'O-methyl uridine phosphorothioate
  modified_base 21: mod_base = OTHER; note = 2'O-methyl uridine
ggcgtgctcgctcaggcagtt

SEQ ID NO: 1517 - RNA, 21 nt, synthetic construct
  source 1..21: mol_type = other RNA
  modified_base 1: mod_base = OTHER; note = 2'O-methyl guanosine phosphorothioate
  modified_base 2: mod_base = OTHER; note = 2'-fluoro guanosine phosphorothioate
  modified_base 3: mod_base = OTHER; note = 2'O-methyl guanosine
  modified_base 4: mod_base = OTHER; note = 2'-fluoro cytidine
  modified_base 5: mod_base = OTHER; note = 2'O-methyl guanosine
  modified_base 6: mod_base = OTHER; note = 2'-fluoro uridine
  modified_base 7: mod_base = OTHER; note = 2'O-methyl guanosine
  modified_base 8: mod_base = OTHER; note = 2'-fluoro cytidine
  modified_base 9: mod_base = OTHER; note = 2'O-methyl uridine
  modified_base 10: mod_base = OTHER; note = 2'-fluoro cytidine
  modified_base 11: mod_base = OTHER; note = 2'O-methyl guanosine
  modified_base 12: mod_base = OTHER; note = 2'-fluoro cytidine
  modified_base 13: mod_base = OTHER; note = 2'O-methyl uridine
  modified_base 14: mod_base = OTHER; note = 2'-fluoro cytidine
  modified_base 15: mod_base = OTHER; note = 2'O-methyl adenosine
  modified_base 16: mod_base = OTHER; note = 2'-fluoro guanosine
  modified_base 17: mod_base = OTHER; note = 2'O-methyl guanosine
  modified_base 18: mod_base = OTHER; note = 2'-fluoro cytidine
  modified_base 19: mod_base = OTHER; note = 2'O-methyl adenosine phosphorothioate
  modified_base 20: mod_base = OTHER; note = 2'O-methyl uridine phosphorothioate
  modified_base 21: mod_base = OTHER; note = 2'O-methyl uridine
gggcgtgctcgctcaggcatt

SEQ ID NO: 1518 - RNA, 21 nt, synthetic construct
  source 1..21: mol_type = other RNA
  modified_base 1: mod_base = OTHER; note = 2'O-methyl cytidine phosphorothioate
  modified_base 2: mod_base = OTHER; note = 2'-fluoro guanosine phosphorothioate
  modified_base 3: mod_base = OTHER; note = 2'O-methyl guanosine
  modified_base 4: mod_base = OTHER; note = 2'-fluoro guanosine
  modified_base 5: mod_base = OTHER; note = 2'O-methyl guanosine
  modified_base 6: mod_base = OTHER; note = 2'-fluoro cytidine
  modified_base 7: mod_base = OTHER; note = 2'O-methyl guanosine
  modified_base 8: mod_base = OTHER; note = 2'-fluoro uridine
  modified_base 9: mod_base = OTHER; note = 2'O-methyl guanosine
  modified_base 10: mod_base = OTHER; note = 2'-fluoro cytidine
  modified_base 11: mod_base = OTHER; note = 2'O-methyl uridine
  modified_base 12: mod_base = OTHER; note = 2'-fluoro cytidine
  modified_base 13: mod_base = OTHER; note = 2'O-methyl guanosine
  modified_base 14: mod_base = OTHER; note = 2'-fluoro cytidine
  modified_base 15: mod_base = OTHER; note = 2'O-methyl uridine
  modified_base 16: mod_base = OTHER; note = 2'-fluoro cytidine
  modified_base 17: mod_base = OTHER; note = 2'O-methyl adenosine
  modified_base 18: mod_base = OTHER; note = 2'-fluoro guanosine
  modified_base 19: mod_base = OTHER; note = 2'O-methyl guanosine phosphorothioate
  modified_base 20: mod_base = OTHER; note = 2'O-methyl uridine phosphorothioate
  modified_base 21: mod_base = OTHER; note = 2'O-methyl uridine
cggggcgtgctcgctcaggtt

SEQ ID NO: 1519 - RNA, 21 nt, synthetic construct
  source 1..21: mol_type = other RNA
  modified_base 1: mod_base = OTHER; note = 2'O-methyl guanosine phosphorothioate
  modified_base 2: mod_base = OTHER; note = 2'-fluoro uridine phosphorothioate
  modified_base 3: mod_base = OTHER; note = 2'O-methyl guanosine
  modified_base 4: mod_base = OTHER; note = 2'-fluoro cytidine
  modified_base 5: mod_base = OTHER; note = 2'O-methyl guanosine
  modified_base 6: mod_base = OTHER; note = 2'-fluoro guanosine
  modified_base 7: mod_base = OTHER; note = 2'O-methyl guanosine
  modified_base 8: mod_base = OTHER; note = 2'-fluoro guanosine
  modified_base 9: mod_base = OTHER; note = 2'O-methyl cytidine
  modified_base 10: mod_base = OTHER; note = 2'-fluoro guanosine
  modified_base 11: mod_base = OTHER; note = 2'O-methyl uridine
  modified_base 12: mod_base = OTHER; note = 2'-fluoro guanosine
  modified_base 13: mod_base = OTHER; note = 2'O-methyl cytidine
  modified_base 14: mod_base = OTHER; note = 2'-fluoro uridine
  modified_base 15: mod_base = OTHER; note = 2'O-methyl cytidine
  modified_base 16: mod_base = OTHER; note = 2'-fluoro guanosine
  modified_base 17: mod_base = OTHER; note = 2'O-methyl cytidine
  modified_base 18: mod_base = OTHER; note = 2'-fluoro uridine
  modified_base 19: mod_base = OTHER; note = 2'O-methyl cytidine phosphorothioate
  modified_base 20: mod_base = OTHER; note = 2'O-methyl uridine phosphorothioate
  modified_base 21: mod_base = OTHER; note = 2'O-methyl uridine
gtgcggggcgtgctcgctctt

SEQ ID NO: 1520 - RNA, 21 nt, synthetic construct
  source 1..21: mol_type = other RNA
  modified_base 1: mod_base = OTHER; note = 2'O-methyl guanosine phosphorothioate
  modified_base 2: mod_base = OTHER; note = 2'-fluoro guanosine phosphorothioate
  modified_base 3: mod_base = OTHER; note = 2'O-methyl uridine
  modified_base 4: mod_base = OTHER; note = 2'-fluoro guanosine
  modified_base 5: mod_base = OTHER; note = 2'O-methyl cytidine
  modified_base 6: mod_base = OTHER; note = 2'-fluoro guanosine
  modified_base 7: mod_base = OTHER; note = 2'O-methyl guanosine
  modified_base 8: mod_base = OTHER; note = 2'-fluoro guanosine
  modified_base 9: mod_base = OTHER; note = 2'O-methyl guanosine
  modified_base 10: mod_base = OTHER; note = 2'-fluoro cytidine
  modified_base 11: mod_base = OTHER; note = 2'O-methyl guanosine
  modified_base 12: mod_base = OTHER; note = 2'-fluoro uridine
  modified_base 13: mod_base = OTHER; note = 2'O-methyl guanosine
  modified_base 14: mod_base = OTHER; note = 2'-fluoro cytidine
  modified_base 15: mod_base = OTHER; note = 2'O-methyl uridine
  modified_base 16: mod_base = OTHER; note = 2'-fluoro cytidine
  modified_base 17: mod_base = OTHER; note = 2'O-methyl guanosine
  modified_base 18: mod_base = OTHER; note = 2'-fluoro cytidine
  modified_base 19: mod_base = OTHER; note = 2'O-methyl uridine phosphorothioate
  modified_base 20: mod_base = OTHER; note = 2'O-methyl uridine phosphorothioate
  modified_base 21: mod_base = OTHER; note = 2'O-methyl uridine
ggtgcggggcgtgctcgcttt

SEQ ID NO: 1521 - RNA, 21 nt, synthetic construct
  source 1..21: mol_type = other RNA
  modified_base 1: mod_base = OTHER; note = 2'O-methyl guanosine phosphorothioate
  modified_base 2: mod_base = OTHER; note = 2'-fluoro guanosine phosphorothioate
  modified_base 3: mod_base = OTHER; note = 2'O-methyl adenosine
  modified_base 4: mod_base = OTHER; note = 2'-fluoro guanosine
  modified_base 5: mod_base = OTHER; note = 2'O-methyl guanosine
  modified_base 6: mod_base = OTHER; note = 2'-fluoro uridine
  modified_base 7: mod_base = OTHER; note = 2'O-methyl guanosine
  modified_base 8: mod_base = OTHER; note = 2'-fluoro cytidine
  modified_base 9: mod_base = OTHER; note = 2'O-methyl guanosine
  modified_base 10: mod_base = OTHER; note = 2'-fluoro guanosine
  modified_base 11: mod_base = OTHER; note = 2'O-methyl guanosine
  modified_base 12: mod_base = OTHER; note = 2'-fluoro guanosine
  modified_base 13: mod_base = OTHER; note = 2'O-methyl cytidine
  modified_base 14: mod_base = OTHER; note = 2'-fluoro guanosine
  modified_base 15: mod_base = OTHER; note = 2'O-methyl uridine
  modified_base 16: mod_base = OTHER; note = 2'-fluoro guanosine
  modified_base 17: mod_base = OTHER; note = 2'O-methyl cytidine
  modified_base 18: mod_base = OTHER; note = 2'-fluoro uridine
  modified_base 19: mod_base = OTHER; note = 2'O-methyl cytidine phosphorothioate
  modified_base 20: mod_base = OTHER; note = 2'O-methyl uridine phosphorothioate
  modified_base 21: mod_base = OTHER; note = 2'O-methyl uridine
ggaggtgcggggcgtgctctt

SEQ ID NO: 1522 - RNA, 21 nt, synthetic construct
  source 1..21: mol_type = other RNA
  modified_base 1: mod_base = OTHER; note = 2'O-methyl uridine phosphorothioate
  modified_base 2: mod_base = OTHER; note = 2'-fluoro cytidine phosphorothioate
  modified_base 3: mod_base = OTHER; note = 2'O-methyl guanosine
  modified_base 4: mod_base = OTHER; note = 2'-fluoro cytidine
  modified_base 5: mod_base = OTHER; note = 2'O-methyl guanosine
  modified_base 6: mod_base = OTHER; note = 2'-fluoro guanosine
  modified_base 7: mod_base = OTHER; note = 2'O-methyl adenosine
  modified_base 8: mod_base = OTHER; note = 2'-fluoro guanosine
  modified_base 9: mod_base = OTHER; note = 2'O-methyl guanosine
  modified_base 10: mod_base = OTHER; note = 2'-fluoro adenosine
  modified_base 11: mod_base = OTHER; note = 2'O-methyl guanosine
  modified_base 12: mod_base = OTHER; note = 2'-fluoro guanosine
  modified_base 13: mod_base = OTHER; note = 2'O-methyl uridine
  modified_base 14: mod_base = OTHER; note = 2'-fluoro guanosine
  modified_base 15: mod_base = OTHER; note = 2'O-methyl cytidine
  modified_base 16: mod_base = OTHER; note = 2'-fluoro guanosine
  modified_base 17: mod_base = OTHER; note = 2'O-methyl guanosine
  modified_base 18: mod_base = OTHER; note = 2'-fluoro guanosine
  modified_base 19: mod_base = OTHER; note = 2'O-methyl guanosine phosphorothioate
  modified_base 20: mod_base = OTHER; note = 2'O-methyl uridine phosphorothioate
  modified_base 21: mod_base = OTHER; note = 2'O-methyl uridine
tcgcggaggaggtgcggggtt

SEQ ID NO: 1523 - RNA, 21 nt, synthetic construct
  source 1..21: mol_type = other RNA
  modified_base 1: mod_base = OTHER; note = 2'O-methyl guanosine phosphorothioate
  modified_base 2: mod_base = OTHER; note = 2'-fluoro uridine phosphorothioate
  modified_base 3: mod_base = OTHER; note = 2'O-methyl cytidine
  modified_base 4: mod_base = OTHER; note = 2'-fluoro guanosine
  modified_base 5: mod_base = OTHER; note = 2'O-methyl cytidine
  modified_base 6: mod_base = OTHER; note = 2'-fluoro guanosine
  modified_base 7: mod_base = OTHER; note = 2'O-methyl guanosine
  modified_base 8: mod_base = OTHER; note = 2'-fluoro adenosine
  modified_base 9: mod_base = OTHER; note = 2'O-methyl guanosine
  modified_base 10: mod_base = OTHER; note = 2'-fluoro guanosine
  modified_base 11: mod_base = OTHER; note = 2'O-methyl adenosine
  modified_base 12: mod_base = OTHER; note = 2'-fluoro guanosine
  modified_base 13: mod_base = OTHER; note = 2'O-methyl guanosine
  modified_base 14: mod_base = OTHER; note = 2'-fluoro uridine
  modified_base 15: mod_base = OTHER; note = 2'O-methyl guanosine
  modified_base 16: mod_base = OTHER; note = 2'-fluoro cytidine
  modified_base 17: mod_base = OTHER; note = 2'O-methyl guanosine
  modified_base 18: mod_base = OTHER; note = 2'-fluoro guanosine
  modified_base 19: mod_base = OTHER; note = 2'O-methyl guanosine phosphorothioate
  modified_base 20: mod_base = OTHER; note = 2'O-methyl uridine phosphorothioate
  modified_base 21: mod_base = OTHER; note = 2'O-methyl uridine
gtcgcggaggaggtgcgggtt

SEQ ID NO: 1524 - RNA, 21 nt, synthetic construct
  source 1..21: mol_type = other RNA
  modified_base 1: mod_base = OTHER; note = 2'O-methyl cytidine phosphorothioate
  modified_base 2: mod_base = OTHER; note = 2'-fluoro guanosine phosphorothioate
  modified_base 3: mod_base = OTHER; note = 2'O-methyl uridine
  modified_base 4: mod_base = OTHER; note = 2'-fluoro cytidine
  modified_base 5: mod_base = OTHER; note = 2'O-methyl guanosine
  modified_base 6: mod_base = OTHER; note = 2'-fluoro cytidine
  modified_base 7: mod_base = OTHER; note = 2'O-methyl guanosine
  modified_base 8: mod_base = OTHER; note = 2'-fluoro guanosine
  modified_base 9: mod_base = OTHER; note = 2'O-methyl adenosine
  modified_base 10: mod_base = OTHER; note = 2'-fluoro guanosine
  modified_base 11: mod_base = OTHER; note = 2'O-methyl guanosine
  modified_base 12: mod_base = OTHER; note = 2'-fluoro adenosine
  modified_base 13: mod_base = OTHER; note = 2'O-methyl guanosine
  modified_base 14: mod_base = OTHER; note = 2'-fluoro guanosine
  modified_base 15: mod_base = OTHER; note = 2'O-methyl uridine
  modified_base 16: mod_base = OTHER; note = 2'-fluoro guanosine
  modified_base 17: mod_base = OTHER; note = 2'O-methyl cytidine
  modified_base 18: mod_base = OTHER; note = 2'-fluoro guanosine
  modified_base 19: mod_base = OTHER; note = 2'O-methyl guanosine phosphorothioate
  modified_base 20: mod_base = OTHER; note = 2'O-methyl uridine phosphorothioate
  modified_base 21: mod_base = OTHER; note = 2'O-methyl uridine
cgtcgcggaggaggtgcggtt

SEQ ID NO: 1525 - RNA, 21 nt, synthetic construct
  source 1..21: mol_type = other RNA
  modified_base 1: mod_base = OTHER; note = 2'O-methyl guanosine phosphorothioate
  modified_base 2: mod_base = OTHER; note = 2'-fluoro cytidine phosphorothioate
  modified_base 3: mod_base = OTHER; note = 2'O-methyl guanosine
  modified_base 4: mod_base = OTHER; note = 2'-fluoro uridine
  modified_base 5: mod_base = OTHER; note = 2'O-methyl cytidine
  modified_base 6: mod_base = OTHER; note = 2'-fluoro guanosine
  modified_base 7: mod_base = OTHER; note = 2'O-methyl cytidine
  modified_base 8: mod_base = OTHER; note = 2'-fluoro guanosine
  modified_base 9: mod_base = OTHER; note = 2'O-methyl guanosine
  modified_base 10: mod_base = OTHER; note = 2'-fluoro adenosine
  modified_base 11: mod_base = OTHER; note = 2'O-methyl guanosine
  modified_base 12: mod_base = OTHER; note = 2'-fluoro guanosine
  modified_base 13: mod_base = OTHER; note = 2'O-methyl adenosine
  modified_base 14: mod_base = OTHER; note = 2'-fluoro guanosine
  modified_base 15: mod_base = OTHER; note = 2'O-methyl guanosine
  modified_base 16: mod_base = OTHER; note = 2'-fluoro uridine
  modified_base 17: mod_base = OTHER; note = 2'O-methyl guanosine
  modified_base 18: mod_base = OTHER; note = 2'-fluoro cytidine
  modified_base 19: mod_base = OTHER; note = 2'O-methyl guanosine phosphorothioate
  modified_base 20: mod_base = OTHER; note = 2'O-methyl uridine phosphorothioate
  modified_base 21: mod_base = OTHER; note = 2'O-methyl uridine
gcgtcgcggaggaggtgcgtt

SEQ ID NO: 1526 - RNA, 21 nt, synthetic construct
  source 1..21: mol_type = other RNA
  modified_base 1: mod_base = OTHER; note = 2'O-methyl guanosine phosphorothioate
  modified_base 2: mod_base = OTHER; note = 2'-fluoro cytidine phosphorothioate
  modified_base 3: mod_base = OTHER; note = 2'O-methyl guanosine
  modified_base 4: mod_base = OTHER; note = 2'-fluoro cytidine
  modified_base 5: mod_base = OTHER; note = 2'O-methyl guanosine
  modified_base 6: mod_base = OTHER; note = 2'-fluoro cytidine
  modified_base 7: mod_base = OTHER; note = 2'O-methyl guanosine
  modified_base 8: mod_base = OTHER; note = 2'-fluoro uridine
  modified_base 9: mod_base = OTHER; note = 2'O-methyl cytidine
  modified_base 10: mod_base = OTHER; note = 2'-fluoro guanosine
  modified_base 11: mod_base = OTHER; note = 2'O-methyl cytidine
  modified_base 12: mod_base = OTHER; note = 2'-fluoro guanosine
  modified_base 13: mod_base = OTHER; note = 2'O-methyl guanosine
  modified_base 14: mod_base = OTHER; note = 2'-fluoro adenosine
  modified_base 15: mod_base = OTHER; note = 2'O-methyl guanosine
  modified_base 16: mod_base = OTHER; note = 2'-fluoro guanosine
  modified_base 17: mod_base = OTHER; note = 2'O-methyl adenosine
  modified_base 18: mod_base = OTHER; note = 2'-fluoro guanosine
  modified_base 19: mod_base = OTHER; note = 2'O-methyl guanosine phosphorothioate
  modified_base 20: mod_base = OTHER; note = 2'O-methyl uridine phosphorothioate
  modified_base 21: mod_base = OTHER; note = 2'O-methyl uridine
gcgcgcgtcgcggaggaggtt

SEQ ID NO: 1527 - RNA, 21 nt, synthetic construct
  source 1..21: mol_type = other RNA
  modified_base 1: mod_base = OTHER; note = 2'O-methyl uridine phosphorothioate
  modified_base 2: mod_base = OTHER; note = 2'-fluoro guanosine phosphorothioate
  modified_base 3: mod_base = OTHER; note = 2'O-methyl cytidine
  modified_base 4: mod_base = OTHER; note = 2'-fluoro guanosine
  modified_base 5: mod_base = OTHER; note = 2'O-methyl cytidine
  modified_base 6: mod_base = OTHER; note = 2'-fluoro guanosine
  modified_base 7: mod_base = OTHER; note = 2'O-methyl cytidine
  modified_base 8: mod_base = OTHER; note = 2'-fluoro guanosine
  modified_base 9: mod_base = OTHER; note = 2'O-methyl uridine
  modified_base 10: mod_base = OTHER; note = 2'-fluoro cytidine
  modified_base 11: mod_base = OTHER; note = 2'O-methyl guanosine
  modified_base 12: mod_base = OTHER; note = 2'-fluoro cytidine
  modified_base 13: mod_base = OTHER; note = 2'O-methyl guanosine
  modified_base 14: mod_base = OTHER; note = 2'-fluoro guanosine
  modified_base 15: mod_base = OTHER; note = 2'O-methyl adenosine
  modified_base 16: mod_base = OTHER; note = 2'-fluoro guanosine
  modified_base 17: mod_base = OTHER; note = 2'O-methyl guanosine
  modified_base 18: mod_base = OTHER; note = 2'-fluoro adenosine
  modified_base 19: mod_base = OTHER; note = 2'O-methyl guanosine phosphorothioate
  modified_base 20: mod_base = OTHER; note = 2'O-methyl uridine phosphorothioate
  modified_base 21: mod_base = OTHER; note = 2'O-methyl uridine
tgcgcgcgtcgcggaggagtt

SEQ ID NO: 1528 - RNA, 21 nt, synthetic construct
  source 1..21: mol_type = other RNA
  modified_base 1: mod_base = OTHER; note = 2'O-methyl adenosine phosphorothioate
  modified_base 2: mod_base = OTHER; note = 2'-fluoro uridine phosphorothioate
  modified_base 3: mod_base = OTHER; note = 2'O-methyl guanosine
  modified_base 4: mod_base = OTHER; note = 2'-fluoro cytidine
  modified_base 5: mod_base = OTHER; note = 2'O-methyl guanosine
  modified_base 6: mod_base = OTHER; note = 2'-fluoro cytidine
  modified_base 7: mod_base = OTHER; note = 2'O-methyl guanosine
  modified_base 8: mod_base = OTHER; note = 2'-fluoro cytidine
  modified_base 9: mod_base = OTHER; note = 2'O-methyl guanosine
  modified_base 10: mod_base = OTHER; note = 2'-fluoro uridine
  modified_base 11: mod_base = OTHER; note = 2'O-methyl cytidine
  modified_base 12: mod_base = OTHER; note = 2'-fluoro guanosine
  modified_base 13: mod_base = OTHER; note = 2'O-methyl cytidine
  modified_base 14: mod_base = OTHER; note = 2'-fluoro guanosine
  modified_base 15: mod_base = OTHER; note = 2'O-methyl guanosine
  modified_base 16: mod_base = OTHER; note = 2'-fluoro adenosine
  modified_base 17: mod_base = OTHER; note = 2'O-methyl guanosine
  modified_base 18: mod_base = OTHER; note = 2'-fluoro guanosine
  modified_base 19: mod_base = OTHER; note = 2'O-methyl adenosine phosphorothioate
  modified_base 20: mod_base = OTHER; note = 2'O-methyl uridine phosphorothioate
  modified_base 21: mod_base = OTHER; note = 2'O-methyl uridine
atgcgcgcgtcgcggaggatt

SEQ ID NO: 1529 - RNA, 21 nt, synthetic construct
  source 1..21: mol_type = other RNA
  modified_base 1: mod_base = OTHER; note = 2'O-methyl cytidine phosphorothioate
  modified_base 2: mod_base = OTHER; note = 2'-fluoro adenosine phosphorothioate
  modified_base 3: mod_base = OTHER; note = 2'O-methyl uridine
  modified_base 4: mod_base = OTHER; note = 2'-fluoro guanosine
  modified_base 5: mod_base = OTHER; note = 2'O-methyl cytidine
  modified_base 6: mod_base = OTHER; note = 2'-fluoro guanosine
  modified_base 7: mod_base = OTHER; note = 2'O-methyl cytidine
  modified_base 8: mod_base = OTHER; note = 2'-fluoro guanosine
  modified_base 9: mod_base = OTHER; note = 2'O-methyl cytidine
  modified_base 10: mod_base = OTHER; note = 2'-fluoro guanosine
  modified_base 11: mod_base = OTHER; note = 2'O-methyl uridine
  modified_base 12: mod_base = OTHER; note = 2'-fluoro cytidine
  modified_base 13: mod_base = OTHER; note = 2'O-methyl guanosine
  modified_base 14: mod_base = OTHER; note = 2'-fluoro cytidine
  modified_base 15: mod_base = OTHER; note = 2'O-methyl guanosine
  modified_base 16: mod_base = OTHER; note = 2'-fluoro guanosine
  modified_base 17: mod_base = OTHER; note = 2'O-methyl adenosine
  modified_base 18: mod_base = OTHER; note = 2'-fluoro guanosine
  modified_base 19: mod_base = OTHER; note = 2'O-methyl guanosine phosphorothioate
  modified_base 20: mod_base = OTHER; note = 2'O-methyl uridine phosphorothioate
  modified_base 21: mod_base = OTHER; note = 2'O-methyl uridine
catgcgcgcgtcgcggaggtt

SEQ ID NO: 1530 - RNA, 21 nt, synthetic construct
  source 1..21: mol_type = other RNA
  modified_base 1: mod_base = OTHER; note = 2'O-methyl adenosine phosphorothioate
  modified_base 2: mod_base = OTHER; note = 2'-fluoro cytidine phosphorothioate
  modified_base 3: mod_base = OTHER; note = 2'O-methyl adenosine
  modified_base 4: mod_base = OTHER; note = 2'-fluoro uridine
  modified_base 5: mod_base = OTHER; note = 2'O-methyl guanosine
  modified_base 6: mod_base = OTHER; note = 2'-fluoro cytidine
  modified_base 7: mod_base = OTHER; note = 2'O-methyl guanosine
  modified_base 8: mod_base = OTHER; note = 2'-fluoro cytidine
  modified_base 9: mod_base = OTHER; note = 2'O-methyl guanosine
  modified_base 10: mod_base = OTHER; note = 2'-fluoro cytidine
  modified_base 11: mod_base = OTHER; note = 2'O-methyl guanosine
  modified_base 12: mod_base = OTHER; note = 2'-fluoro uridine
  modified_base 13: mod_base = OTHER; note = 2'O-methyl cytidine
  modified_base 14: mod_base = OTHER; note = 2'-fluoro guanosine
  modified_base 15: mod_base = OTHER; note = 2'O-methyl cytidine
  modified_base 16: mod_base = OTHER; note = 2'-fluoro guanosine
  modified_base 17: mod_base = OTHER; note = 2'O-methyl guanosine
  modified_base 18: mod_base = OTHER; note = 2'-fluoro adenosine
  modified_base 19: mod_base = OTHER; note = 2'O-methyl guanosine phosphorothioate
  modified_base 20: mod_base = OTHER; note = 2'O-methyl uridine phosphorothioate
  modified_base 21: mod_base = OTHER; note = 2'O-methyl uridine
acatgcgcgcgtcgcggagtt

SEQ ID NO: 1531 - RNA, 21 nt, synthetic construct
  source 1..21: mol_type = other RNA
  modified_base 1: mod_base = OTHER; note = 2'O-methyl adenosine phosphorothioate
  modified_base 2: mod_base = OTHER; note = 2'-fluoro adenosine phosphorothioate
  modified_base 3: mod_base = OTHER; note = 2'O-methyl cytidine
  modified_base 4: mod_base = OTHER; note = 2'-fluoro adenosine
  modified_base 5: mod_base = OTHER; note = 2'O-methyl uridine
  modified_base 6: mod_base = OTHER; note = 2'-fluoro guanosine
  modified_base 7: mod_base = OTHER; note = 2'O-methyl cytidine
  modified_base 8: mod_base = OTHER; note = 2'-fluoro guanosine
  modified_base 9: mod_base = OTHER; note = 2'O-methyl cytidine
  modified_base 10: mod_base = OTHER; note = 2'-fluoro guanosine
  modified_base 11: mod_base = OTHER; note = 2'O-methyl cytidine
  modified_base 12: mod_base = OTHER; note = 2'-fluoro guanosine
  modified_base 13: mod_base = OTHER; note = 2'O-methyl uridine
  modified_base 14: mod_base = OTHER; note = 2'-fluoro cytidine
  modified_base 15: mod_base = OTHER; note = 2'O-methyl guanosine
  modified_base 16: mod_base = OTHER; note = 2'-fluoro cytidine
  modified_base 17: mod_base = OTHER; note = 2'O-methyl guanosine
  modified_base 18: mod_base = OTHER; note = 2'-fluoro guanosine
  modified_base 19: mod_base = OTHER; note = 2'O-methyl adenosine phosphorothioate
  modified_base 20: mod_base = OTHER; note = 2'O-methyl uridine phosphorothioate
  modified_base 21: mod_base = OTHER; note = 2'O-methyl uridine
aacatgcgcgcgtcgcggatt

SEQ ID NO: 1532 - RNA, 21 nt, synthetic construct
  source 1..21: mol_type = other RNA
  modified_base 1: mod_base = OTHER; note = 2'O-methyl cytidine phosphorothioate
  modified_base 2: mod_base = OTHER; note = 2'-fluoro adenosine phosphorothioate
  modified_base 3: mod_base = OTHER; note = 2'O-methyl adenosine
  modified_base 4: mod_base = OTHER; note = 2'-fluoro cytidine
  modified_base 5: mod_base = OTHER; note = 2'O-methyl adenosine
  modified_base 6: mod_base = OTHER; note = 2'-fluoro uridine
  modified_base 7: mod_base = OTHER; note = 2'O-methyl guanosine
  modified_base 8: mod_base = OTHER; note = 2'-fluoro cytidine
  modified_base 9: mod_base = OTHER; note = 2'O-methyl guanosine
  modified_base 10: mod_base = OTHER; note = 2'-fluoro cytidine
  modified_base 11: mod_base = OTHER; note = 2'O-methyl guanosine
  modified_base 12: mod_base = OTHER; note = 2'-fluoro cytidine
  modified_base 13: mod_base = OTHER; note = 2'O-methyl guanosine
  modified_base 14: mod_base = OTHER; note = 2'-fluoro uridine
  modified_base 15: mod_base = OTHER; note = 2'O-methyl cytidine
  modified_base 16: mod_base = OTHER; note = 2'-fluoro guanosine
  modified_base 17: mod_base = OTHER; note = 2'O-methyl cytidine
  modified_base 18: mod_base = OTHER; note = 2'-fluoro guanosine
  modified_base 19: mod_base = OTHER; note = 2'O-methyl guanosine phosphorothioate
  modified_base 20: mod_base = OTHER; note = 2'O-methyl uridine phosphorothioate
  modified_base 21: mod_base = OTHER; note = 2'O-methyl uridine
caacatgcgcgcgtcgcggtt

SEQ ID NO: 1533 - RNA, 21 nt, synthetic construct
  source 1..21: mol_type = other RNA
  modified_base 1: mod_base = OTHER; note = 2'O-methyl adenosine phosphorothioate
  modified_base 2: mod_base = OTHER; note = 2'-fluoro cytidine phosphorothioate
  modified_base 3: mod_base = OTHER; note = 2'O-methyl adenosine
  modified_base 4: mod_base = OTHER; note = 2'-fluoro adenosine
  modified_base 5: mod_base = OTHER; note = 2'O-methyl cytidine
  modified_base 6: mod_base = OTHER; note = 2'-fluoro adenosine
  modified_base 7: mod_base = OTHER; note = 2'O-methyl uridine
  modified_base 8: mod_base = OTHER; note = 2'-fluoro guanosine
  modified_base 9: mod_base = OTHER; note = 2'O-methyl cytidine
  modified_base 10: mod_base = OTHER; note = 2'-fluoro guanosine
  modified_base 11: mod_base = OTHER; note = 2'O-methyl cytidine
  modified_base 12: mod_base = OTHER; note = 2'-fluoro guanosine
  modified_base 13: mod_base = OTHER; note = 2'O-methyl cytidine
  modified_base 14: mod_base = OTHER; note = 2'-fluoro guanosine
  modified_base 15: mod_base = OTHER; note = 2'O-methyl uridine
  modified_base 16: mod_base = OTHER; note = 2'-fluoro cytidine
  modified_base 17: mod_base = OTHER; note = 2'O-methyl guanosine
  modified_base 18: mod_base = OTHER; note = 2'-fluoro cytidine
  modified_base 19: mod_base = OTHER; note = 2'O-methyl guanosine phosphorothioate
  modified_base 20: mod_base = OTHER; note = 2'O-methyl uridine phosphorothioate
  modified_base 21: mod_base = OTHER; note = 2'O-methyl uridine
acaacatgcgcgcgtcgcgtt

SEQ ID NO: 1534 - RNA, 21 nt, synthetic construct
  source 1..21: mol_type = other RNA
  modified_base 1: mod_base = OTHER; note = 2'O-methyl adenosine phosphorothioate
  modified_base 2: mod_base = OTHER; note = 2'-fluoro adenosine phosphorothioate
  modified_base 3: mod_base = OTHER; note = 2'O-methyl cytidine
  modified_base 4: mod_base = OTHER; note = 2'-fluoro adenosine
  modified_base 5: mod_base = OTHER; note = 2'O-methyl adenosine
  modified_base 6: mod_base = OTHER; note = 2'-fluoro cytidine
  modified_base 7: mod_base = OTHER; note = 2'O-methyl adenosine
  modified_base 8: mod_base = OTHER; note = 2'-fluoro uridine
  modified_base 9: mod_base = OTHER; note = 2'O-methyl guanosine
  modified_base 10: mod_base = OTHER; note = 2'-fluoro cytidine
  modified_base 11: mod_base = OTHER; note = 2'O-methyl guanosine
  modified_base 12: mod_base = OTHER; note = 2'-fluoro cytidine
  modified_base 13: mod_base = OTHER; note = 2'O-methyl guanosine
  modified_base 14: mod_base = OTHER; note = 2'-fluoro cytidine
  modified_base 15: mod_base = OTHER; note = 2'O-methyl guanosine
  modified_base 16: mod_base = OTHER; note = 2'-fluoro uridine
  modified_base 17: mod_base = OTHER; note = 2'O-methyl cytidine
  modified_base 18: mod_base = OTHER; note = 2'-fluoro guanosine
  modified_base 19: mod_base = OTHER; note = 2'O-methyl cytidine phosphorothioate
  modified_base 20: mod_base = OTHER; note = 2'O-methyl uridine phosphorothioate
  modified_base 21: mod_base = OTHER; note = 2'O-methyl uridine
aacaacatgcgcgcgtcgctt

SEQ ID NO: 1535 - RNA, 21 nt, synthetic construct
  source 1..21: mol_type = other RNA
  modified_base 1: mod_base = OTHER; note = 2'O-methyl cytidine phosphorothioate
  modified_base 2: mod_base = OTHER; note = 2'-fluoro guanosine phosphorothioate
  modified_base 3: mod_base = OTHER; note = 2'O-methyl adenosine
  modified_base 4: mod_base = OTHER; note = 2'-fluoro adenosine
  modified_base 5: mod_base = OTHER; note = 2'O-methyl cytidine
  modified_base 6: mod_base = OTHER; note = 2'-fluoro adenosine
  modified_base 7: mod_base = OTHER; note = 2'O-methyl adenosine
  modified_base 8: mod_base = OTHER; note = 2'-fluoro cytidine
  modified_base 9: mod_base = OTHER; note = 2'O-methyl adenosine
  modified_base 10: mod_base = OTHER; note = 2'-fluoro uridine
  modified_base 11: mod_base = OTHER; note = 2'O-methyl guanosine
  modified_base 12: mod_base = OTHER; note = 2'-fluoro cytidine
  modified_base 13: mod_base = OTHER; note = 2'O-methyl guanosine
  modified_base 14: mod_base = OTHER; note = 2'-fluoro cytidine
  modified_base 15: mod_base = OTHER; note = 2'O-methyl guanosine
  modified_base 16: mod_base = OTHER; note = 2'-fluoro cytidine
  modified_base 17: mod_base = OTHER; note = 2'O-methyl guanosine
  modified_base 18: mod_base = OTHER; note = 2'-fluoro uridine
  modified_base 19: mod_base = OTHER; note = 2'O-methyl cytidine phosphorothioate
  modified_base 20: mod_base = OTHER; note = 2'O-methyl uridine phosphorothioate
  modified_base 21: mod_base = OTHER; note = 2'O-methyl uridine
cgaacaacatgcgcgcgtctt

SEQ ID NO: 1536 - RNA, 21 nt, synthetic construct
  source 1..21: mol_type = other RNA
  modified_base 1: mod_base = OTHER; note = 2'O-methyl cytidine phosphorothioate
  modified_base 2: mod_base = OTHER; note = 2'-fluoro cytidine phosphorothioate
  modified_base 3: mod_base = OTHER; note = 2'O-methyl guanosine
  modified_base 4: mod_base = OTHER; note = 2'-fluoro adenosine
  modified_base 5: mod_base = OTHER; note = 2'O-methyl adenosine
  modified_base 6: mod_base = OTHER; note = 2'-fluoro cytidine
  modified_base 7: mod_base = OTHER; note = 2'O-methyl adenosine
  modified_base 8: mod_base = OTHER; note = 2'-fluoro adenosine
  modified_base 9: mod_base = OTHER; note = 2'O-methyl cytidine
  modified_base 10: mod_base = OTHER; note = 2'-fluoro adenosine
  modified_base 11: mod_base = OTHER; note = 2'O-methyl uridine
  modified_base 12: mod_base = OTHER; note = 2'-fluoro guanosine
  modified_base 13: mod_base = OTHER; note = 2'O-methyl cytidine
  modified_base 14: mod_base = OTHER; note = 2'-fluoro guanosine
  modified_base 15: mod_base = OTHER; note = 2'O-methyl cytidine
  modified_base 16: mod_base = OTHER; note = 2'-fluoro guanosine
  modified_base 17: mod_base = OTHER; note = 2'O-methyl cytidine
  modified_base 18: mod_base = OTHER; note = 2'-fluoro guanosine
  modified_base 19: mod_base = OTHER; note = 2'O-methyl uridine phosphorothioate
  modified_base 20: mod_base = OTHER; note = 2'O-methyl uridine phosphorothioate
  modified_base 21: mod_base = OTHER; note = 2'O-methyl uridine
ccgaacaacatgcgcgcgttt

SEQ ID NO: 1537 - RNA, 21 nt, synthetic construct
  source 1..21: mol_type = other RNA
  modified_base 1: mod_base = OTHER; note = 2'O-methyl guanosine phosphorothioate
  modified_base 2: mod_base = OTHER; note = 2'-fluoro cytidine phosphorothioate
  modified_base 3: mod_base = OTHER; note = 2'O-methyl cytidine
  modified_base 4: mod_base = OTHER; note = 2'-fluoro guanosine
  modified_base 5: mod_base = OTHER; note = 2'O-methyl adenosine
  modified_base 6: mod_base = OTHER; note = 2'-fluoro adenosine
  modified_base 7: mod_base = OTHER; note = 2'O-methyl cytidine
  modified_base 8: mod_base = OTHER; note = 2'-fluoro adenosine
  modified_base 9: mod_base = OTHER; note = 2'O-methyl adenosine
  modified_base 10: mod_base = OTHER; note = 2'-fluoro cytidine
  modified_base 11: mod_base = OTHER; note = 2'O-methyl adenosine
  modified_base 12: mod_base = OTHER; note = 2'-fluoro uridine
  modified_base 13: mod_base = OTHER; note = 2'O-methyl guanosine
  modified_base 14: mod_base = OTHER; note = 2'-fluoro cytidine
  modified_base 15: mod_base = OTHER; note = 2'O-methyl guanosine
  modified_base 16: mod_base = OTHER; note = 2'-fluoro cytidine
  modified_base 17: mod_base = OTHER; note = 2'O-methyl guanosine
  modified_base 18: mod_base = OTHER; note = 2'-fluoro cytidine
  modified_base 19: mod_base = OTHER; note = 2'O-methyl guanosine phosphorothioate
  modified_base 20: mod_base = OTHER; note = 2'O-methyl uridine phosphorothioate
  modified_base 21: mod_base = OTHER; note = 2'O-methyl uridine
gccgaacaacatgcgcgcgtt

SEQ ID NO: 1538 - RNA, 21 nt, synthetic construct
  source 1..21: mol_type = other RNA
  modified_base 1: mod_base = OTHER; note = 2'O-methyl cytidine phosphorothioate
  modified_base 2: mod_base = OTHER; note = 2'-fluoro guanosine phosphorothioate
  modified_base 3: mod_base = OTHER; note = 2'O-methyl cytidine
  modified_base 4: mod_base = OTHER; note = 2'-fluoro cytidine
  modified_base 5: mod_base = OTHER; note = 2'O-methyl guanosine
  modified_base 6: mod_base = OTHER; note = 2'-fluoro adenosine
  modified_base 7: mod_base = OTHER; note = 2'O-methyl adenosine
  modified_base 8: mod_base = OTHER; note = 2'-fluoro cytidine
  modified_base 9: mod_base = OTHER; note = 2'O-methyl adenosine
  modified_base 10: mod_base = OTHER; note = 2'-fluoro adenosine
  modified_base 11: mod_base = OTHER; note = 2'O-methyl cytidine
  modified_base 12: mod_base = OTHER; note = 2'-fluoro adenosine
  modified_base 13: mod_base = OTHER; note = 2'O-methyl uridine
  modified_base 14: mod_base = OTHER; note = 2'-fluoro guanosine
  modified_base 15: mod_base = OTHER; note = 2'O-methyl cytidine
  modified_base 16: mod_base = OTHER; note = 2'-fluoro guanosine
  modified_base 17: mod_base = OTHER; note = 2'O-methyl cytidine
  modified_base 18: mod_base = OTHER; note = 2'-fluoro guanosine
  modified_base 19: mod_base = OTHER; note = 2'O-methyl cytidine phosphorothioate
  modified_base 20: mod_base = OTHER; note = 2'O-methyl uridine phosphorothioate
  modified_base 21: mod_base = OTHER; note = 2'O-methyl uridine
cgccgaacaacatgcgcgctt

SEQ ID NO: 1539 - RNA, 21 nt, synthetic construct
  source 1..21: mol_type = other RNA
  modified_base 1: mod_base = OTHER; note = 2'O-methyl cytidine phosphorothioate
  modified_base 2: mod_base = OTHER; note = 2'-fluoro guanosine phosphorothioate
  modified_base 3: mod_base = OTHER; note = 2'O-methyl guanosine
  modified_base 4: mod_base = OTHER; note = 2'-fluoro cytidine
  modified_base 5: mod_base = OTHER; note = 2'O-methyl cytidine
  modified_base 6: mod_base = OTHER; note = 2'-fluoro guanosine
  modified_base 7: mod_base = OTHER; note = 2'O-methyl adenosine
  modified_base 8: mod_base = OTHER; note = 2'-fluoro adenosine
  modified_base 9: mod_base = OTHER; note = 2'O-methyl guanosine
  modified_base 10: mod_base = OTHER; note = 2'-fluoro cytidine
  modified_base 11: mod_base = OTHER; note = 2'O-methyl guanosine
  modified_base 12: mod_base = OTHER; note = 2'-fluoro cytidine
  modified_base 13: mod_base = OTHER; note = 2'O-methyl cytidine
  modified_base 14: mod_base = OTHER; note = 2'-fluoro guanosine
  modified_base 15: mod_base = OTHER; note = 2'O-methyl adenosine
  modified_base 16: mod_base = OTHER; note = 2'-fluoro adenosine
  modified_base 17: mod_base = OTHER; note = 2'O-methyl cytidine
  modified_base 18: mod_base = OTHER; note = 2'-fluoro adenosine
  modified_base 19: mod_base = OTHER; note = 2'O-methyl adenosine phosphorothioate
  modified_base 20: mod_base = OTHER; note = 2'O-methyl uridine phosphorothioate
  modified_base 21: mod_base = OTHER; note = 2'O-methyl uridine
cggccgaagcgccgaacaatt

SEQ ID NO: 1540 - RNA, 21 nt, synthetic construct
  source 1..21: mol_type = other RNA
  modified_base 1: mod_base = OTHER; note = 2'O-methyl cytidine phosphorothioate
  modified_base 2: mod_base = OTHER; note = 2'-fluoro cytidine phosphorothioate
  modified_base 3: mod_base = OTHER; note = 2'O-methyl guanosine
  modified_base 4: mod_base = OTHER; note = 2'-fluoro guanosine
  modified_base 5: mod_base = OTHER; note = 2'O-methyl cytidine
  modified_base 6: mod_base = OTHER; note = 2'-fluoro cytidine
  modified_base 7: mod_base = OTHER; note = 2'O-methyl guanosine
  modified_base 8: mod_base = OTHER; note = 2'-fluoro adenosine
  modified_base 9: mod_base = OTHER; note = 2'O-methyl adenosine
  modified_base 10: mod_base = OTHER; note = 2'-fluoro guanosine
  modified_base 11: mod_base = OTHER; note = 2'O-methyl cytidine
  modified_base 12: mod_base = OTHER; note = 2'-fluoro guanosine
  modified_base 13: mod_base = OTHER; note = 2'O-methyl cytidine
  modified_base 14: mod_base = OTHER; note = 2'-fluoro cytidine
  modified_base 15: mod_base = OTHER; note = 2'O-methyl guanosine
  modified_base 16: mod_base = OTHER; note = 2'-fluoro adenosine
  modified_base 17: mod_base = OTHER; note = 2'O-methyl adenosine
  modified_base 18: mod_base = OTHER; note = 2'-fluoro cytidine
  modified_base 19: mod_base = OTHER; note = 2'O-methyl adenosine phosphorothioate
  modified_base 20: mod_base = OTHER; note = 2'O-methyl uridine phosphorothioate
  modified_base 21: mod_base = OTHER; note = 2'O-methyl uridine
ccggccgaagcgccgaacatt

SEQ ID NO: 1541 - RNA, 21 nt, synthetic construct
  source 1..21: mol_type = other RNA
  modified_base 1: mod_base = OTHER; note = 2'O-methyl adenosine phosphorothioate
  modified_base 2: mod_base = OTHER; note = 2'-fluoro guanosine phosphorothioate
  modified_base 3: mod_base = OTHER; note = 2'O-methyl uridine
  modified_base 4: mod_base = OTHER; note = 2'-fluoro guanosine
  modified_base 5: mod_base = OTHER; note = 2'O-methyl cytidine
  modified_base 6: mod_base = OTHER; note = 2'-fluoro adenosine
  modified_base 7: mod_base = OTHER; note = 2'O-methyl adenosine
  modified_base 8: mod_base = OTHER; note = 2'-fluoro cytidine
  modified_base 9: mod_base = OTHER; note = 2'O-methyl guanosine
  modified_base 10: mod_base = OTHER; note = 2'-fluoro cytidine
  modified_base 11: mod_base = OTHER; note = 2'O-methyl cytidine
  modified_base 12: mod_base = OTHER; note = 2'-fluoro cytidine
  modified_base 13: mod_base = OTHER; note = 2'O-methyl cytidine
  modified_base 14: mod_base = OTHER; note = 2'-fluoro guanosine
  modified_base 15: mod_base = OTHER; note = 2'O-methyl guanosine
  modified_base 16: mod_base = OTHER; note = 2'-fluoro cytidine
  modified_base 17: mod_base = OTHER; note = 2'O-methyl cytidine
  modified_base 18: mod_base = OTHER; note = 2'-fluoro guanosine
  modified_base 19: mod_base = OTHER; note = 2'O-methyl adenosine phosphorothioate
  modified_base 20: mod_base = OTHER; note = 2'O-methyl uridine phosphorothioate
  modified_base 21: mod_base = OTHER; note = 2'O-methyl uridine
agtgcaacgccccggccgatt

SEQ ID NO: 1542 - RNA, 21 nt, synthetic construct
  source 1..21: mol_type = other RNA
  modified_base 1: mod_base = OTHER; note = 2'O-methyl uridine phosphorothioate
  modified_base 2: mod_base = OTHER; note = 2'-fluoro cytidine phosphorothioate
  modified_base 3: mod_base = OTHER; note = 2'O-methyl cytidine
  modified_base 4: mod_base = OTHER; note = 2'-fluoro uridine
  modified_base 5: mod_base = OTHER; note = 2'O-methyl guanosine
  modified_base 6: mod_base = OTHER; note = 2'-fluoro guanosine
  modified_base 7: mod_base = OTHER; note = 2'O-methyl cytidine
  modified_base 8: mod_base = OTHER; note = 2'-fluoro cytidine
  modified_base 9: mod_base = OTHER; note = 2'O-methyl uridine
  modified_base 10: mod_base = OTHER; note = 2'-fluoro uridine
  modified_base 11: mod_base = OTHER; note = 2'O-methyl cytidine
  modified_base 12: mod_base = OTHER; note = 2'-fluoro cytidine
  modified_base 13: mod_base = OTHER; note = 2'O-methyl guanosine
  modified_base 14: mod_base = OTHER; note = 2'-fluoro cytidine
  modified_base 15: mod_base = OTHER; note = 2'O-methyl adenosine
  modified_base 16: mod_base = OTHER; note = 2'-fluoro cytidine
  modified_base 17: mod_base = OTHER; note = 2'O-methyl adenosine
  modified_base 18: mod_base = OTHER; note = 2'-fluoro adenosine
  modified_base 19: mod_base = OTHER; note = 2'O-methyl guanosine phosphorothioate
  modified_base 20: mod_base = OTHER; note = 2'O-methyl uridine phosphorothioate
  modified_base 21: mod_base = OTHER; note = 2'O-methyl uridine
tcctggccttccgcacaagtt

SEQ ID NO: 1543 - RNA, 21 nt, synthetic construct
  source 1..21: mol_type = other RNA
  modified_base 1: mod_base = OTHER; note = 2'O-methyl adenosine phosphorothioate
  modified_base 2: mod_base = OTHER; note = 2'-fluoro cytidine phosphorothioate
  modified_base 3: mod_base = OTHER; note = 2'O-methyl uridine
  modified_base 4: mod_base = OTHER; note = 2'-fluoro cytidine
  modified_base 5: mod_base = OTHER; note = 2'O-methyl cytidine
  modified_base 6: mod_base = OTHER; note = 2'-fluoro uridine
  modified_base 7: mod_base = OTHER; note = 2'O-methyl guanosine
  modified_base 8: mod_base = OTHER; note = 2'-fluoro guanosine
  modified_base 9: mod_base = OTHER; note = 2'O-methyl cytidine
  modified_base 10: mod_base = OTHER; note = 2'-fluoro cytidine
  modified_base 11: mod_base = OTHER; note = 2'O-methyl uridine
  modified_base 12: mod_base = OTHER; note = 2'-fluoro uridine
  modified_base 13: mod_base = OTHER; note = 2'O-methyl cytidine
  modified_base 14: mod_base = OTHER; note = 2'-fluoro cytidine
  modified_base 15: mod_base = OTHER; note = 2'O-methyl guanosine
  modified_base 16: mod_base = OTHER; note = 2'-fluoro cytidine
  modified_base 17: mod_base = OTHER; note = 2'O-methyl adenosine
  modified_base 18: mod_base = OTHER; note = 2'-fluoro cytidine
  modified_base 19: mod_base = OTHER; note = 2'O-methyl adenosine phosphorothioate
  modified_base 20: mod_base = OTHER; note = 2'O-methyl uridine phosphorothioate
  modified_base 21: mod_base = OTHER; note = 2'O-methyl uridine
actcctggccttccgcacatt

SEQ ID NO: 1544 - RNA, 21 nt, synthetic construct
  source 1..21: mol_type = other RNA
  modified_base 1: mod_base = OTHER; note = 2'O-methyl cytidine phosphorothioate
  modified_base 2: mod_base = OTHER; note = 2'-fluoro guanosine phosphorothioate
  modified_base 3: mod_base = OTHER; note = 2'O-methyl adenosine
  modified_base 4: mod_base = OTHER; note = 2'-fluoro cytidine
  modified_base 5: mod_base = OTHER; note = 2'O-methyl uridine
  modified_base 6: mod_base = OTHER; note = 2'-fluoro cytidine
  modified_base 7: mod_base = OTHER; note = 2'O-methyl cytidine
  modified_base 8: mod_base = OTHER; note = 2'-fluoro uridine
  modified_base 9: mod_base = OTHER; note = 2'O-methyl guanosine
  modified_base 10: mod_base = OTHER; note = 2'-fluoro guanosine
  modified_base 11: mod_base = OTHER; note = 2'O-methyl cytidine
  modified_base 12: mod_base = OTHER; note = 2'-fluoro cytidine
  modified_base 13: mod_base = OTHER; note = 2'O-methyl uridine
  modified_base 14: mod_base = OTHER; note = 2'-fluoro uridine
  modified_base 15: mod_base = OTHER; note = 2'O-methyl cytidine
  modified_base 16: mod_base = OTHER; note = 2'-fluoro cytidine
  modified_base 17: mod_base = OTHER; note = 2'O-methyl guanosine
  modified_base 18: mod_base = OTHER; note = 2'-fluoro cytidine
  modified_base 19: mod_base = OTHER; note = 2'O-methyl adenosine phosphorothioate
  modified_base 20: mod_base = OTHER; note = 2'O-methyl uridine phosphorothioate
  modified_base 21: mod_base = OTHER; note = 2'O-methyl uridine
cgactcctggccttccgcatt

SEQ ID NO: 1545 - RNA, 21 nt, synthetic construct
  source 1..21: mol_type = other RNA
  modified_base 1: mod_base = OTHER; note = 2'O-methyl uridine phosphorothioate
  modified_base 2: mod_base = OTHER; note = 2'-fluoro cytidine phosphorothioate
  modified_base 3: mod_base = OTHER; note = 2'O-methyl cytidine
  modified_base 4: mod_base = OTHER; note = 2'-fluoro guanosine
  modified_base 5: mod_base = OTHER; note = 2'O-methyl adenosine
  modified_base 6: mod_base = OTHER; note = 2'-fluoro cytidine
  modified_base 7: mod_base = OTHER; note = 2'O-methyl uridine
  modified_base 8: mod_base = OTHER; note = 2'-fluoro cytidine
  modified_base 9: mod_base = OTHER; note = 2'O-methyl cytidine
  modified_base 10: mod_base = OTHER; note = 2'-fluoro uridine
  modified_base 11: mod_base = OTHER; note = 2'O-methyl guanosine
  modified_base 12: mod_base = OTHER; note = 2'-fluoro guanosine
  modified_base 13: mod_base = OTHER; note = 2'O-methyl cytidine
  modified_base 14: mod_base = OTHER; note = 2'-fluoro cytidine
  modified_base 15: mod_base = OTHER; note = 2'O-methyl uridine
  modified_base 16: mod_base = OTHER; note = 2'-fluoro uridine
  modified_base 17: mod_base = OTHER; note = 2'O-methyl cytidine
  modified_base 18: mod_base = OTHER; note = 2'-fluoro cytidine
  modified_base 19: mod_base = OTHER; note = 2'O-methyl guanosine phosphorothioate
  modified_base 20: mod_base = OTHER; note = 2'O-methyl uridine phosphorothioate
  modified_base 21: mod_base = OTHER; note = 2'O-methyl uridine
tccgactcctggccttccgtt

SEQ ID NO: 1546 - RNA, 21 nt, synthetic construct
  source 1..21: mol_type = other RNA
  modified_base 1: mod_base = OTHER; note = 2'O-methyl uridine phosphorothioate
  modified_base 2: mod_base = OTHER; note = 2'-fluoro guanosine phosphorothioate
  modified_base 3: mod_base = OTHER; note = 2'O-methyl uridine
  modified_base 4: mod_base = OTHER; note = 2'-fluoro uridine
  modified_base 5: mod_base = OTHER; note = 2'O-methyl cytidine
  modified_base 6: mod_base = OTHER; note = 2'-fluoro cytidine
  modified_base 7: mod_base = OTHER; note = 2'O-methyl guanosine
  modified_base 8: mod_base = OTHER; note = 2'-fluoro adenosine
  modified_base 9: mod_base = OTHER; note = 2'O-methyl cytidine
  modified_base 10: mod_base = OTHER; note = 2'-fluoro uridine
  modified_base 11: mod_base = OTHER; note = 2'O-methyl cytidine
  modified_base 12: mod_base = OTHER; note = 2'-fluoro cytidine
  modified_base 13: mod_base = OTHER; note = 2'O-methyl uridine
  modified_base 14: mod_base = OTHER; note = 2'-fluoro guanosine
  modified_base 15: mod_base = OTHER; note = 2'O-methyl guanosine
  modified_base 16: mod_base = OTHER; note = 2'-fluoro cytidine
  modified_base 17: mod_base = OTHER; note = 2'O-methyl cytidine
  modified_base 18: mod_base = OTHER; note = 2'-fluoro uridine
  modified_base 19: mod_base = OTHER; note = 2'O-methyl uridine phosphorothioate
  modified_base 20: mod_base = OTHER; note = 2'O-methyl uridine phosphorothioate
  modified_base 21: mod_base = OTHER; note = 2'O-methyl uridine
tgttccgactcctggcctttt

SEQ ID NO: 1547 - RNA, 21 nt, synthetic construct
  source 1..21: mol_type = other RNA
  modified_base 1: mod_base = OTHER; note = 2'O-methyl adenosine phosphorothioate
  modified_base 2: mod_base = OTHER; note = 2'-fluoro uridine phosphorothioate
  modified_base 3: mod_base = OTHER; note = 2'O-methyl guanosine
  modified_base 4: mod_base = OTHER; note = 2'-fluoro uridine
  modified_base 5: mod_base = OTHER; note = 2'O-methyl uridine
  modified_base 6: mod_base = OTHER; note = 2'-fluoro cytidine
  modified_base 7: mod_base = OTHER; note = 2'O-methyl cytidine
  modified_base 8: mod_base = OTHER; note = 2'-fluoro guanosine
  modified_base 9: mod_base = OTHER; note = 2'O-methyl adenosine
  modified_base 10: mod_base = OTHER; note = 2'-fluoro cytidine
  modified_base 11: mod_base = OTHER; note = 2'O-methyl uridine
  modified_base 12: mod_base = OTHER; note = 2'-fluoro cytidine
  modified_base 13: mod_base = OTHER; note = 2'O-methyl cytidine
  modified_base 14: mod_base = OTHER; note = 2'-fluoro uridine
  modified_base 15: mod_base = OTHER; note = 2'O-methyl guanosine
  modified_base 16: mod_base = OTHER; note = 2'-fluoro guanosine
  modified_base 17: mod_base = OTHER; note = 2'O-methyl cytidine
  modified_base 18: mod_base = OTHER; note = 2'-fluoro cytidine
  modified_base 19: mod_base = OTHER; note = 2'O-methyl uridine phosphorothioate
  modified_base 20: mod_base = OTHER; note = 2'O-methyl uridine phosphorothioate
  modified_base 21: mod_base = OTHER; note = 2'O-methyl uridine
atgttccgactcctggccttt

SEQ ID NO: 1548 - RNA, 21 nt, synthetic construct
  source 1..21: mol_type = other RNA
  modified_base 1: mod_base = OTHER; note = 2'O-methyl adenosine phosphorothioate
  modified_base 2: mod_base = OTHER; note = 2'-fluoro adenosine phosphorothioate
  modified_base 3: mod_base = OTHER; note = 2'O-methyl uridine
  modified_base 4: mod_base = OTHER; note = 2'-fluoro guanosine
  modified_base 5: mod_base = OTHER; note = 2'O-methyl uridine
  modified_base 6: mod_base = OTHER; note = 2'-fluoro uridine
  modified_base 7: mod_base = OTHER; note = 2'O-methyl cytidine
  modified_base 8: mod_base = OTHER; note = 2'-fluoro cytidine
  modified_base 9: mod_base = OTHER; note = 2'O-methyl guanosine
  modified_base 10: mod_base = OTHER; note = 2'-fluoro adenosine
  modified_base 11: mod_base = OTHER; note = 2'O-methyl cytidine
  modified_base 12: mod_base = OTHER; note = 2'-fluoro uridine
  modified_base 13: mod_base = OTHER; note = 2'O-methyl cytidine
  modified_base 14: mod_base = OTHER; note = 2'-fluoro cytidine
  modified_base 15: mod_base = OTHER; note = 2'O-methyl uridine
  modified_base 16: mod_base = OTHER; note = 2'-fluoro guanosine
  modified_base 17: mod_base = OTHER; note = 2'O-methyl guanosine
  modified_base 18: mod_base = OTHER; note = 2'-fluoro cytidine
  modified_base 19: mod_base = OTHER; note = 2'O-methyl cytidine phosphorothioate
  modified_base 20: mod_base = OTHER; note = 2'O-methyl uridine phosphorothioate
  modified_base 21: mod_base = OTHER; note = 2'O-methyl uridine
aatgttccgactcctggcctt

SEQ ID NO: 1549 - RNA, 21 nt, synthetic construct
  source 1..21: mol_type = other RNA
  modified_base 1: mod_base = OTHER; note = 2'O-methyl guanosine phosphorothioate
  modified_base 2: mod_base = OTHER; note = 2'-fluoro cytidine phosphorothioate
  modified_base 3: mod_base = OTHER; note = 2'O-methyl cytidine
  modified_base 4: mod_base = OTHER; note = 2'-fluoro adenosine
  modified_base 5: mod_base = OTHER; note = 2'O-methyl adenosine
  modified_base 6: mod_base = OTHER; note = 2'-fluoro uridine
  modified_base 7: mod_base = OTHER; note = 2'O-methyl guanosine
  modified_base 8: mod_base = OTHER; note = 2'-fluoro uridine
  modified_base 9: mod_base = OTHER; note = 2'O-methyl uridine
  modified_base 10: mod_base = OTHER; note = 2'-fluoro cytidine
  modified_base 11: mod_base = OTHER; note = 2'O-methyl cytidine
  modified_base 12: mod_base = OTHER; note = 2'-fluoro guanosine
  modified_base 13: mod_base = OTHER; note = 2'O-methyl adenosine
  modified_base 14: mod_base = OTHER; note = 2'-fluoro cytidine
  modified_base 15: mod_base = OTHER; note = 2'O-methyl uridine
  modified_base 16: mod_base = OTHER; note = 2'-fluoro cytidine
  modified_base 17: mod_base = OTHER; note = 2'O-methyl cytidine
  modified_base 18: mod_base = OTHER; note = 2'-fluoro uridine
  modified_base 19: mod_base = OTHER; note = 2'O-methyl guanosine phosphorothioate
  modified_base 20: mod_base = OTHER; note = 2'O-methyl uridine phosphorothioate
  modified_base 21: mod_base = OTHER; note = 2'O-methyl uridine
gccaatgttccgactcctgtt

SEQ ID NO: 1550 - RNA, 21 nt, synthetic construct
  source 1..21: mol_type = other RNA
  modified_base 1: mod_base = OTHER; note = 2'O-methyl uridine phosphorothioate
  modified_base 2: mod_base = OTHER; note = 2'-fluoro guanosine phosphorothioate
  modified_base 3: mod_base = OTHER; note = 2'O-methyl cytidine
  modified_base 4: mod_base = OTHER; note = 2'-fluoro cytidine
  modified_base 5: mod_base = OTHER; note = 2'O-methyl adenosine
  modified_base 6: mod_base = OTHER; note = 2'-fluoro adenosine
  modified_base 7: mod_base = OTHER; note = 2'O-methyl uridine
  modified_base 8: mod_base = OTHER; note = 2'-fluoro guanosine
  modified_base 9: mod_base = OTHER; note = 2'O-methyl uridine
  modified_base 10: mod_base = OTHER; note = 2'-fluoro uridine
  modified_base 11: mod_base = OTHER; note = 2'O-methyl cytidine
  modified_base 12: mod_base = OTHER; note = 2'-fluoro cytidine
  modified_base 13: mod_base = OTHER; note = 2'O-methyl guanosine
  modified_base 14: mod_base = OTHER; note = 2'-fluoro adenosine
  modified_base 15: mod_base = OTHER; note = 2'O-methyl cytidine
  modified_base 16: mod_base = OTHER; note = 2'-fluoro uridine
  modified_base 17: mod_base = OTHER; note = 2'O-methyl cytidine
  modified_base 18: mod_base = OTHER; note = 2'-fluoro cytidine
  modified_base 19: mod_base = OTHER; note = 2'O-methyl uridine phosphorothioate
  modified_base 20: mod_base = OTHER; note = 2'O-methyl uridine phosphorothioate
  modified_base 21: mod_base = OTHER; note = 2'O-methyl uridine
tgccaatgttccgactccttt

SEQ ID NO: 1551 - RNA, 21 nt, synthetic construct
  source 1..21: mol_type = other RNA
  modified_base 1: mod_base = OTHER; note = 2'O-methyl guanosine phosphorothioate
  modified_base 2: mod_base = OTHER; note = 2'-fluoro guanosine phosphorothioate
  modified_base 3: mod_base = OTHER; note = 2'O-methyl adenosine
  modified_base 4: mod_base = OTHER; note = 2'-fluoro adenosine
  modified_base 5: mod_base = OTHER; note = 2'O-methyl guanosine
  modified_base 6: mod_base = OTHER; note = 2'-fluoro adenosine
  modified_base 7: mod_base = OTHER; note = 2'O-methyl uridine
  modified_base 8: mod_base = OTHER; note = 2'-fluoro guanosine
  modified_base 9: mod_base = OTHER; note = 2'O-methyl cytidine
  modified_base 10: mod_base = OTHER; note = 2'-fluoro cytidine
  modified_base 11: mod_base = OTHER; note = 2'O-methyl adenosine
  modified_base 12: mod_base = OTHER; note = 2'-fluoro adenosine
  modified_base 13: mod_base = OTHER; note = 2'O-methyl uridine
  modified_base 14: mod_base = OTHER; note = 2'-fluoro guanosine
  modified_base 15: mod_base = OTHER; note = 2'O-methyl uridine
  modified_base 16: mod_base = OTHER; note = 2'-fluoro uridine
  modified_base 17: mod_base = OTHER; note = 2'O-methyl cytidine
  modified_base 18: mod_base = OTHER; note = 2'-fluoro cytidine
  modified_base 19: mod_base = OTHER; note = 2'O-methyl guanosine phosphorothioate
  modified_base 20: mod_base = OTHER; note = 2'O-methyl uridine phosphorothioate
  modified_base 21: mod_base = OTHER; note = 2'O-methyl uridine
ggaagatgccaatgttccgtt

SEQ ID NO: 1552 - RNA, 21 nt, synthetic construct
  source 1..21: mol_type = other RNA
  modified_base 1: mod_base = OTHER; note = 2'O-methyl guanosine phosphorothioate
  modified_base 2: mod_base = OTHER; note = 2'-fluoro adenosine phosphorothioate
  modified_base 3: mod_base = OTHER; note = 2'O-methyl uridine
  modified_base 4: mod_base = OTHER; note = 2'-fluoro guanosine
  modified_base 5: mod_base = OTHER; note = 2'O-methyl guanosine
  modified_base 6: mod_base = OTHER; note = 2'-fluoro adenosine
  modified_base 7: mod_base = OTHER; note = 2'O-methyl adenosine
  modified_base 8: mod_base = OTHER; note = 2'-fluoro guanosine
  modified_base 9: mod_base = OTHER; note = 2'O-methyl adenosine
  modified_base 10: mod_base = OTHER; note = 2'-fluoro uridine
  modified_base 11: mod_base = OTHER; note = 2'O-methyl guanosine
  modified_base 12: mod_base = OTHER; note = 2'-fluoro cytidine
  modified_base 13: mod_base = OTHER; note = 2'O-methyl cytidine
  modified_base 14: mod_base = OTHER; note = 2'-fluoro adenosine
  modified_base 15: mod_base = OTHER; note = 2'O-methyl adenosine
  modified_base 16: mod_base = OTHER; note = 2'-fluoro uridine
  modified_base 17: mod_base = OTHER; note = 2'O-methyl guanosine
  modified_base 18: mod_base = OTHER; note = 2'-fluoro uridine
  modified_base 19: mod_base = OTHER; note = 2'O-methyl uridine phosphorothioate
  modified_base 20: mod_base = OTHER; note = 2'O-methyl uridine phosphorothioate
  modified_base 21: mod_base = OTHER; note = 2'O-methyl uridine
gatggaagatgccaatgtttt

SEQ ID NO: 1553 - RNA, 21 nt, synthetic construct
  source 1..21: mol_type = other RNA
  modified_base 1: mod_base = OTHER; note = 2'O-methyl guanosine phosphorothioate
  modified_base 2: mod_base = OTHER; note = 2'-fluoro guanosine phosphorothioate
  modified_base 3: mod_base = OTHER; note = 2'O-methyl adenosine
  modified_base 4: mod_base = OTHER; note = 2'-fluoro uridine
  modified_base 5: mod_base = OTHER; note = 2'O-methyl guanosine
  modified_base 6: mod_base = OTHER; note = 2'-fluoro guanosine
  modified_base 7: mod_base = OTHER; note = 2'O-methyl adenosine
  modified_base 8: mod_base = OTHER; note = 2'-fluoro adenosine
  modified_base 9: mod_base = OTHER; note = 2'O-methyl guanosine
  modified_base 10: mod_base = OTHER; note = 2'-fluoro adenosine
  modified_base 11: mod_base = OTHER; note = 2'O-methyl uridine
  modified_base 12: mod_base = OTHER; note = 2'-fluoro guanosine
  modified_base 13: mod_base = OTHER; note = 2'O-methyl cytidine
  modified_base 14: mod_base = OTHER; note = 2'-fluoro cytidine
  modified_base 15: mod_base = OTHER; note = 2'O-methyl adenosine
  modified_base 16: mod_base = OTHER; note = 2'-fluoro adenosine
  modified_base 17: mod_base = OTHER; note = 2'O-methyl uridine
  modified_base 18: mod_base = OTHER; note = 2'-fluoro guanosine
  modified_base 19: mod_base = OTHER; note = 2'O-methyl uridine phosphorothioate
  modified_base 20: mod_base = OTHER; note = 2'O-methyl uridine phosphorothioate
  modified_base 21: mod_base = OTHER; note = 2'O-methyl uridine
ggatggaagatgccaatgttt

SEQ ID NO: 1554 - RNA, 21 nt, synthetic construct
  source 1..21: mol_type = other RNA
  modified_base 1: mod_base = OTHER; note = 2'O-methyl adenosine phosphorothioate
  modified_base 2: mod_base = OTHER; note = 2'-fluoro cytidine phosphorothioate
  modified_base 3: mod_base = OTHER; note = 2'O-methyl uridine
  modified_base 4: mod_base = OTHER; note = 2'-fluoro uridine
  modified_base 5: mod_base = OTHER; note = 2'O-methyl guanosine
  modified_base 6: mod_base = OTHER; note = 2'-fluoro cytidine
  modified_base 7: mod_base = OTHER; note = 2'O-methyl uridine
  modified_base 8: mod_base = OTHER; note = 2'-fluoro uridine
  modified_base 9: mod_base = OTHER; note = 2'O-methyl adenosine
  modified_base 10: mod_base = OTHER; note = 2'-fluoro adenosine
  modified_base 11: mod_base = OTHER; note = 2'O-methyl guanosine
  modified_base 12: mod_base = OTHER; note = 2'-fluoro uridine
  modified_base 13: mod_base = OTHER; note = 2'O-methyl uridine
  modified_base 14: mod_base = OTHER; note = 2'-fluoro guanosine
  modified_base 15: mod_base = OTHER; note = 2'O-methyl adenosine
  modified_base 16: mod_base = OTHER; note = 2'-fluoro adenosine
  modified_base 17: mod_base = OTHER; note = 2'O-methyl guanosine
  modified_base 18: mod_base = OTHER; note = 2'-fluoro guanosine
  modified_base 19: mod_base = OTHER; note = 2'O-methyl adenosine phosphorothioate
  modified_base 20: mod_base = OTHER; note = 2'O-methyl uridine phosphorothioate
  modified_base 21: mod_base = OTHER; note = 2'O-methyl uridine
acttgcttaagttgaaggatt

SEQ ID NO: 1555 - RNA, 21 nt, synthetic construct
  source 1..21: mol_type = other RNA
  modified_base 1: mod_base = OTHER; note = 2'O-methyl guanosine phosphorothioate
  modified_base 2: mod_base = OTHER; note = 2'-fluoro adenosine phosphorothioate
  modified_base 3: mod_base = OTHER; note = 2'O-methyl adenosine
  modified_base 4: mod_base = OTHER; note = 2'-fluoro cytidine
  modified_base 5: mod_base = OTHER; note = 2'O-methyl uridine
  modified_base 6: mod_base = OTHER; note = 2'-fluoro uridine
  modified_base 7: mod_base = OTHER; note = 2'O-methyl guanosine
  modified_base 8: mod_base = OTHER; note = 2'-fluoro cytidine
  modified_base 9: mod_base = OTHER; note = 2'O-methyl uridine
  modified_base 10: mod_base = OTHER; note = 2'-fluoro uridine
  modified_base 11: mod_base = OTHER; note = 2'O-methyl adenosine
  modified_base 12: mod_base = OTHER; note = 2'-fluoro adenosine
  modified_base 13: mod_base = OTHER; note = 2'O-methyl guanosine
  modified_base 14: mod_base = OTHER; note = 2'-fluoro uridine
  modified_base 15: mod_base = OTHER; note = 2'O-methyl uridine
  modified_base 16: mod_base = OTHER; note = 2'-fluoro guanosine
  modified_base 17: mod_base = OTHER; note = 2'O-methyl adenosine
  modified_base 18: mod_base = OTHER; note = 2'-fluoro adenosine
  modified_base 19: mod_base = OTHER; note = 2'O-methyl guanosine phosphorothioate
  modified_base 20: mod_base = OTHER; note = 2'O-methyl uridine phosphorothioate
  modified_base 21: mod_base = OTHER; note = 2'O-methyl uridine
gaacttgcttaagttgaagtt

SEQ ID NO: 1556 - RNA, 21 nt, synthetic construct
  source 1..21: mol_type = other RNA
  modified_base 1: mod_base = OTHER; note = 2'O-methyl uridine phosphorothioate
  modified_base 2: mod_base = OTHER; note = 2'-fluoro guanosine phosphorothioate
  modified_base 3: mod_base = OTHER; note = 2'O-methyl guanosine
  modified_base 4: mod_base = OTHER; note = 2'-fluoro adenosine
  modified_base 5: mod_base = OTHER; note = 2'O-methyl cytidine
  modified_base 6: mod_base = OTHER; note = 2'-fluoro adenosine
  modified_base 7: mod_base = OTHER; note = 2'O-methyl uridine
  modified_base 8: mod_base = OTHER; note = 2'-fluoro uridine
  modified_base 9: mod_base = OTHER; note = 2'O-methyl guanosine
  modified_base 10: mod_base = OTHER; note = 2'-fluoro guanosine
  modified_base 11: mod_base = OTHER; note = 2'O-methyl cytidine
  modified_base 12: mod_base = OTHER; note = 2'-fluoro cytidine
  modified_base 13: mod_base = OTHER; note = 2'O-methyl guanosine
  modified_base 14: mod_base = OTHER; note = 2'-fluoro guanosine
  modified_base 15: mod_base = OTHER; note = 2'O-methyl guanosine
  modified_base 16: mod_base = OTHER; note = 2'-fluoro adenosine
  modified_base 17: mod_base = OTHER; note = 2'O-methyl guanosine
  modified_base 18: mod_base = OTHER; note = 2'-fluoro guanosine
  modified_base 19: mod_base = OTHER; note = 2'O-methyl cytidine phosphorothioate
  modified_base 20: mod_base = OTHER; note = 2'O-methyl uridine phosphorothioate
  modified_base 21: mod_base = OTHER; note = 2'O-methyl uridine
tggacattggccgggaggctt

SEQ ID NO: 1557 - RNA, 21 nt, synthetic construct
  source 1..21: mol_type = other RNA
  modified_base 1: mod_base = OTHER; note = 2'O-methyl guanosine phosphorothioate
  modified_base 2: mod_base = OTHER; note = 2'-fluoro uridine phosphorothioate
  modified_base 3: mod_base = OTHER; note = 2'O-methyl guanosine
  modified_base 4: mod_base = OTHER; note = 2'-fluoro guanosine
  modified_base 5: mod_base = OTHER; note = 2'O-methyl adenosine
  modified_base 6: mod_base = OTHER; note = 2'-fluoro cytidine
  modified_base 7: mod_base = OTHER; note = 2'O-methyl adenosine
  modified_base 8: mod_base = OTHER; note = 2'-fluoro uridine
  modified_base 9: mod_base = OTHER; note = 2'O-methyl uridine
  modified_base 10: mod_base = OTHER; note = 2'-fluoro guanosine
  modified_base 11: mod_base = OTHER; note = 2'O-methyl guanosine
  modified_base 12: mod_base = OTHER; note = 2'-fluoro cytidine
  modified_base 13: mod_base = OTHER; note = 2'O-methyl cytidine
  modified_base 14: mod_base = OTHER; note = 2'-fluoro guanosine
  modified_base 15: mod_base = OTHER; note = 2'O-methyl guanosine
  modified_base 16: mod_base = OTHER; note = 2'-fluoro guanosine
  modified_base 17: mod_base = OTHER; note = 2'O-methyl adenosine
  modified_base 18: mod_base = OTHER; note = 2'-fluoro guanosine
  modified_base 19: mod_base = OTHER; note = 2'O-methyl guanosine phosphorothioate
  modified_base 20: mod_base = OTHER; note = 2'O-methyl uridine phosphorothioate
  modified_base 21: mod_base = OTHER; note = 2'O-methyl uridine
gtggacattggccgggaggtt

SEQ ID NO: 1558 - RNA, 21 nt, synthetic construct
  source 1..21: mol_type = other RNA
  modified_base 1: mod_base = OTHER; note = 2'O-methyl adenosine phosphorothioate
  modified_base 2: mod_base = OTHER; note = 2'-fluoro uridine phosphorothioate
  modified_base 3: mod_base = OTHER; note = 2'O-methyl guanosine
  modified_base 4: mod_base = OTHER; note = 2'-fluoro adenosine
  modified_base 5: mod_base = OTHER; note = 2'O-methyl guanosine
  modified_base 6: mod_base = OTHER; note = 2'-fluoro cytidine
  modified_base 7: mod_base = OTHER; note = 2'O-methyl uridine
  modified_base 8: mod_base = OTHER; note = 2'-fluoro guanosine
  modified_base 9: mod_base = OTHER; note = 2'O-methyl guanosine
  modified_base 10: mod_base = OTHER; note = 2'-fluoro uridine
  modified_base 11: mod_base = OTHER; note = 2'O-methyl guanosine
  modified_base 12: mod_base = OTHER; note = 2'-fluoro guanosine
  modified_base 13: mod_base = OTHER; note = 2'O-methyl adenosine
  modified_base 14: mod_base = OTHER; note = 2'-fluoro cytidine
  modified_base 15: mod_base = OTHER; note = 2'O-methyl adenosine
  modified_base 16: mod_base = OTHER; note = 2'-fluoro uridine
  modified_base 17: mod_base = OTHER; note = 2'O-methyl uridine
  modified_base 18: mod_base = OTHER; note = 2'-fluoro guanosine
  modified_base 19: mod_base = OTHER; note = 2'O-methyl guanosine phosphorothioate
  modified_base 20: mod_base = OTHER; note = 2'O-methyl uridine phosphorothioate
  modified_base 21: mod_base = OTHER; note = 2'O-methyl uridine
atgagctggtggacattggtt

SEQ ID NO: 1559 - RNA, 21 nt, synthetic construct
  source 1..21: mol_type = other RNA
  modified_base 1: mod_base = OTHER; note = 2'O-methyl adenosine phosphorothioate
  modified_base 2: mod_base = OTHER; note = 2'-fluoro guanosine phosphorothioate
  modified_base 3: mod_base = OTHER; note = 2'O-methyl adenosine
  modified_base 4: mod_base = OTHER; note = 2'-fluoro uridine
  modified_base 5: mod_base = OTHER; note = 2'O-methyl guanosine
  modified_base 6: mod_base = OTHER; note = 2'-fluoro adenosine
  modified_base 7: mod_base = OTHER; note = 2'O-methyl guanosine
  modified_base 8: mod_base = OTHER; note = 2'-fluoro cytidine
  modified_base 9: mod_base = OTHER; note = 2'O-methyl uridine
  modified_base 10: mod_base = OTHER; note = 2'-fluoro guanosine
  modified_base 11: mod_base = OTHER; note = 2'O-methyl guanosine
  modified_base 12: mod_base = OTHER; note = 2'-fluoro uridine
  modified_base 13: mod_base = OTHER; note = 2'O-methyl guanosine
  modified_base 14: mod_base = OTHER; note = 2'-fluoro guanosine
  modified_base 15: mod_base = OTHER; note = 2'O-methyl adenosine
  modified_base 16: mod_base = OTHER; note = 2'-fluoro cytidine
  modified_base 17: mod_base = OTHER; note = 2'O-methyl adenosine
  modified_base 18: mod_base = OTHER; note = 2'-fluoro uridine
  modified_base 19: mod_base = OTHER; note = 2'O-methyl uridine phosphorothioate
  modified_base 20: mod_base = OTHER; note = 2'O-methyl uridine phosphorothioate
  modified_base 21: mod_base = OTHER; note = 2'O-methyl uridine
agatgagctggtggacatttt

SEQ ID NO: 1560 - RNA, 21 nt, synthetic construct
  source 1..21: mol_type = other RNA
  modified_base 1: mod_base = OTHER; note = 2'O-methyl guanosine phosphorothioate
  modified_base 2: mod_base = OTHER; note = 2'-fluoro adenosine phosphorothioate
  modified_base 3: mod_base = OTHER; note = 2'O-methyl guanosine
  modified_base 4: mod_base = OTHER; note = 2'-fluoro adenosine
  modified_base 5: mod_base = OTHER; note = 2'O-methyl uridine
  modified_base 6: mod_base = OTHER; note = 2'-fluoro guanosine
  modified_base 7: mod_base = OTHER; note = 2'O-methyl adenosine
  modified_base 8: mod_base = OTHER; note = 2'-fluoro guanosine
  modified_base 9: mod_base = OTHER; note = 2'O-methyl cytidine
  modified_base 10: mod_base = OTHER; note = 2'-fluoro uridine
  modified_base 11: mod_base = OTHER; note = 2'O-methyl guanosine
  modified_base 12: mod_base = OTHER; note = 2'-fluoro guanosine
  modified_base 13: mod_base = OTHER; note = 2'O-methyl uridine
  modified_base 14: mod_base = OTHER; note = 2'-fluoro guanosine
  modified_base 15: mod_base = OTHER; note = 2'O-methyl guanosine
  modified_base 16: mod_base = OTHER; note = 2'-fluoro adenosine
  modified_base 17: mod_base = OTHER; note = 2'O-methyl cytidine
  modified_base 18: mod_base = OTHER; note = 2'-fluoro adenosine
  modified_base 19: mod_base = OTHER; note = 2'O-methyl uridine phosphorothioate
  modified_base 20: mod_base = OTHER; note = 2'O-methyl uridine phosphorothioate
  modified_base 21: mod_base = OTHER; note = 2'O-methyl uridine
gagatgagctggtggacattt

SEQ ID NO: 1561 - RNA, 21 nt, synthetic construct
  source 1..21: mol_type = other RNA
  modified_base 1: mod_base = OTHER; note = 2'O-methyl cytidine phosphorothioate
  modified_base 2: mod_base = OTHER; note = 2'-fluoro guanosine phosphorothioate
  modified_base 3: mod_base = OTHER; note = 2'O-methyl guanosine
  modified_base 4: mod_base = OTHER; note = 2'-fluoro adenosine
  modified_base 5: mod_base = OTHER; note = 2'O-methyl guanosine
  modified_base 6: mod_base = OTHER; note = 2'-fluoro adenosine
  modified_base 7: mod_base = OTHER; note = 2'O-methyl uridine
  modified_base 8: mod_base = OTHER; note = 2'-fluoro guanosine
  modified_base 9: mod_base = OTHER; note = 2'O-methyl adenosine
  modified_base 10: mod_base = OTHER; note = 2'-fluoro guanosine
  modified_base 11: mod_base = OTHER; note = 2'O-methyl cytidine
  modified_base 12: mod_base = OTHER; note = 2'-fluoro uridine
  modified_base 13: mod_base = OTHER; note = 2'O-methyl guanosine
  modified_base 14: mod_base = OTHER; note = 2'-fluoro guanosine
  modified_base 15: mod_base = OTHER; note = 2'O-methyl uridine
  modified_base 16: mod_base = OTHER; note = 2'-fluoro guanosine
  modified_base 17: mod_base = OTHER; note = 2'O-methyl guanosine
  modified_base 18: mod_base = OTHER; note = 2'-fluoro adenosine
  modified_base 19: mod_base = OTHER; note = 2'O-methyl cytidine phosphorothioate
  modified_base 20: mod_base = OTHER; note = 2'O-methyl uridine phosphorothioate
  modified_base 21: mod_base = OTHER; note = 2'O-methyl uridine
cggagatgagctggtggactt

SEQ ID NO: 1562 - RNA, 21 nt, synthetic construct
  source 1..21: mol_type = other RNA
  modified_base 1: mod_base = OTHER; note = 2'O-methyl cytidine phosphorothioate
  modified_base 2: mod_base = OTHER; note = 2'-fluoro cytidine phosphorothioate
  modified_base 3: mod_base = OTHER; note = 2'O-methyl guanosine
  modified_base 4: mod_base = OTHER; note = 2'-fluoro guanosine
  modified_base 5: mod_base = OTHER; note = 2'O-methyl adenosine
  modified_base 6: mod_base = OTHER; note = 2'-fluoro guanosine
  modified_base 7: mod_base = OTHER; note = 2'O-methyl adenosine
  modified_base 8: mod_base = OTHER; note = 2'-fluoro uridine
  modified_base 9: mod_base = OTHER; note = 2'O-methyl guanosine
  modified_base 10: mod_base = OTHER; note = 2'-fluoro adenosine
  modified_base 11: mod_base = OTHER; note = 2'O-methyl guanosine
  modified_base 12: mod_base = OTHER; note = 2'-fluoro cytidine
  modified_base 13: mod_base = OTHER; note = 2'O-methyl uridine
  modified_base 14: mod_base = OTHER; note = 2'-fluoro guanosine
  modified_base 15: mod_base = OTHER; note = 2'O-methyl guanosine
  modified_base 16: mod_base = OTHER; note = 2'-fluoro uridine
  modified_base 17: mod_base = OTHER; note = 2'O-methyl guanosine
  modified_base 18: mod_base = OTHER; note = 2'-fluoro guanosine
  modified_base 19: mod_base = OTHER; note = 2'O-methyl adenosine phosphorothioate
  modified_base 20: mod_base = OTHER; note = 2'O-methyl uridine phosphorothioate
  modified_base 21: mod_base = OTHER; note = 2'O-methyl uridine
ccggagatgagctggtggatt

SEQ ID NO: 1563 - RNA, 21 nt, synthetic construct
  source 1..21: mol_type = other RNA
  modified_base 1: mod_base = OTHER; note = 2'O-methyl uridine phosphorothioate
  modified_base 2: mod_base = OTHER; note = 2'-fluoro uridine phosphorothioate
  modified_base 3: mod_base = OTHER; note = 2'O-methyl uridine
  modified_base 4: mod_base = OTHER; note = 2'-fluoro guanosine
  modified_base 5: mod_base = OTHER; note = 2'O-methyl cytidine
  modified_base 6: mod_base = OTHER; note = 2'-fluoro cytidine
  modified_base 7: mod_base = OTHER; note = 2'O-methyl guanosine
  modified_base 8: mod_base = OTHER; note = 2'-fluoro guanosine
  modified_base 9: mod_base = OTHER; note = 2'O-methyl adenosine
  modified_base 10: mod_base = OTHER; note = 2'-fluoro guanosine
  modified_base 11: mod_base = OTHER; note = 2'O-methyl adenosine
  modified_base 12: mod_base = OTHER; note = 2'-fluoro uridine
  modified_base 13: mod_base = OTHER; note = 2'O-methyl guanosine
  modified_base 14: mod_base = OTHER; note = 2'-fluoro adenosine
  modified_base 15: mod_base = OTHER; note = 2'O-methyl guanosine
  modified_base 16: mod_base = OTHER; note = 2'-fluoro cytidine
  modified_base 17: mod_base = OTHER; note = 2'O-methyl uridine
  modified_base 18: mod_base = OTHER; note = 2'-fluoro guanosine
  modified_base 19: mod_base = OTHER; note = 2'O-methyl guanosine phosphorothioate
  modified_base 20: mod_base = OTHER; note = 2'O-methyl uridine phosphorothioate
  modified_base 21: mod_base = OTHER; note = 2'O-methyl uridine
tttgccggagatgagctggtt

SEQ ID NO: 1564 - RNA, 21 nt, synthetic construct
  source 1..21: mol_type = other RNA
  modified_base 1: mod_base = OTHER; note = 2'O-methyl cytidine phosphorothioate
  modified_base 2: mod_base = OTHER; note = 2'-fluoro uridine phosphorothioate
  modified_base 3: mod_base = OTHER; note = 2'O-methyl cytidine
  modified_base 4: mod_base = OTHER; note = 2'-fluoro uridine
  modified_base 5: mod_base = OTHER; note = 2'O-methyl guanosine
  modified_base 6: mod_base = OTHER; note = 2'-fluoro guanosine
  modified_base 7: mod_base = OTHER; note = 2'O-methyl uridine
  modified_base 8: mod_base = OTHER; note = 2'-fluoro adenosine
  modified_base 9: mod_base = OTHER; note = 2'O-methyl adenosine
  modified_base 10: mod_base = OTHER; note = 2'-fluoro guanosine
  modified_base 11: mod_base = OTHER; note = 2'O-methyl adenosine
  modified_base 12: mod_base = OTHER; note = 2'-fluoro guanosine
  modified_base 13: mod_base = OTHER; note = 2'O-methyl adenosine
  modified_base 14: mod_base = OTHER; note = 2'-fluoro guanosine
  modified_base 15: mod_base = OTHER; note = 2'O-methyl adenosine
  modified_base 16: mod_base = OTHER; note = 2'-fluoro uridine
  modified_base 17: mod_base = OTHER; note = 2'O-methyl guanosine
  modified_base 18: mod_base = OTHER; note = 2'-fluoro cytidine
  modified_base 19: mod_base = OTHER; note = 2'O-methyl cytidine phosphorothioate
  modified_base 20: mod_base = OTHER; note = 2'O-methyl uridine phosphorothioate
  modified_base 21: mod_base = OTHER; note = 2'O-methyl uridine
ctctggtaagagagatgcctt

SEQ ID NO: 1565 - RNA, 21 nt, synthetic construct
  source 1..21: mol_type = other RNA
  modified_base 1: mod_base = OTHER; note = 2'O-methyl adenosine phosphorothioate
  modified_base 2: mod_base = OTHER; note = 2'-fluoro uridine phosphorothioate
  modified_base 3: mod_base = OTHER; note = 2'O-methyl cytidine
  modified_base 4: mod_base = OTHER; note = 2'-fluoro adenosine
  modified_base 5: mod_base = OTHER; note = 2'O-methyl guanosine
  modified_base 6: mod_base = OTHER; note = 2'-fluoro adenosine
  modified_base 7: mod_base = OTHER; note = 2'O-methyl cytidine
  modified_base 8: mod_base = OTHER; note = 2'-fluoro adenosine
  modified_base 9: mod_base = OTHER; note = 2'O-methyl cytidine
  modified_base 10: mod_base = OTHER; note = 2'-fluoro uridine
  modified_base 11: mod_base = OTHER; note = 2'O-methyl cytidine
  modified_base 12: mod_base = OTHER; note = 2'-fluoro uridine
  modified_base 13: mod_base = OTHER; note = 2'O-methyl guanosine
  modified_base 14: mod_base = OTHER; note = 2'-fluoro guanosine
  modified_base 15: mod_base = OTHER; note = 2'O-methyl uridine
  modified_base 16: mod_base = OTHER; note = 2'-fluoro adenosine
  modified_base 17: mod_base = OTHER; note = 2'O-methyl adenosine
  modified_base 18: mod_base = OTHER; note = 2'-fluoro guanosine
  modified_base 19: mod_base = OTHER; note = 2'O-methyl adenosine phosphorothioate
  modified_base 20: mod_base = OTHER; note = 2'O-methyl uridine phosphorothioate
  modified_base 21: mod_base = OTHER; note = 2'O-methyl uridine
atcagacactctggtaagatt

SEQ ID NO: 1566 - RNA, 21 nt, synthetic construct
  source 1..21: mol_type = other RNA
  modified_base 1: mod_base = OTHER; note = 2'O-methyl cytidine phosphorothioate
  modified_base 2: mod_base = OTHER; note = 2'-fluoro adenosine phosphorothioate
  modified_base 3: mod_base = OTHER; note = 2'O-methyl uridine
  modified_base 4: mod_base = OTHER; note = 2'-fluoro cytidine
  modified_base 5: mod_base = OTHER; note = 2'O-methyl adenosine
  modified_base 6: mod_base = OTHER; note = 2'-fluoro guanosine
  modified_base 7: mod_base = OTHER; note = 2'O-methyl adenosine
  modified_base 8: mod_base = OTHER; note = 2'-fluoro cytidine
  modified_base 9: mod_base = OTHER; note = 2'O-methyl adenosine
  modified_base 10: mod_base = OTHER; note = 2'-fluoro cytidine
  modified_base 11: mod_base = OTHER; note = 2'O-methyl uridine
  modified_base 12: mod_base = OTHER; note = 2'-fluoro cytidine
  modified_base 13: mod_base = OTHER; note = 2'O-methyl uridine
  modified_base 14: mod_base = OTHER; note = 2'-fluoro guanosine
  modified_base 15: mod_base = OTHER; note = 2'O-methyl guanosine
  modified_base 16: mod_base = OTHER; note = 2'-fluoro uridine
  modified_base 17: mod_base = OTHER; note = 2'O-methyl adenosine
  modified_base 18: mod_base = OTHER; note = 2'-fluoro adenosine
  modified_base 19: mod_base = OTHER; note = 2'O-methyl guanosine phosphorothioate
  modified_base 20: mod_base = OTHER; note = 2'O-methyl uridine phosphorothioate
  modified_base 21: mod_base = OTHER; note = 2'O-methyl uridine
catcagacactctggtaagtt

SEQ ID NO: 1567 - RNA, 21 nt, synthetic construct
  source 1..21: mol_type = other RNA
  modified_base 1: mod_base = OTHER; note = 2'O-methyl cytidine phosphorothioate
  modified_base 2: mod_base = OTHER; note = 2'-fluoro cytidine phosphorothioate
  modified_base 3: mod_base = OTHER; note = 2'O-methyl adenosine
  modified_base 4: mod_base = OTHER; note = 2'-fluoro uridine
  modified_base 5: mod_base = OTHER; note = 2'O-methyl cytidine
  modified_base 6: mod_base = OTHER; note = 2'-fluoro adenosine
  modified_base 7: mod_base = OTHER; note = 2'O-methyl guanosine
  modified_base 8: mod_base = OTHER; note = 2'-fluoro adenosine
  modified_base 9: mod_base = OTHER; note = 2'O-methyl cytidine
  modified_base 10: mod_base = OTHER; note = 2'-fluoro adenosine
  modified_base 11: mod_base = OTHER; note = 2'O-methyl cytidine
  modified_base 12: mod_base = OTHER; note = 2'-fluoro uridine
  modified_base 13: mod_base = OTHER; note = 2'O-methyl cytidine
  modified_base 14: mod_base = OTHER; note = 2'-fluoro uridine
  modified_base 15: mod_base = OTHER; note = 2'O-methyl guanosine
  modified_base 16: mod_base = OTHER; note = 2'-fluoro guanosine
  modified_base 17: mod_base = OTHER; note = 2'O-methyl uridine
  modified_base 18: mod_base = OTHER; note = 2'-fluoro adenosine
  modified_base 19: mod_base = OTHER; note = 2'O-methyl adenosine phosphorothioate
  modified_base 20: mod_base = OTHER; note = 2'O-methyl uridine phosphorothioate
  modified_base 21: mod_base = OTHER; note = 2'O-methyl uridine
ccatcagacactctggtaatt

SEQ ID NO: 1568 - RNA, 21 nt, synthetic construct
  source 1..21: mol_type = other RNA
  modified_base 1: mod_base = OTHER; note = 2'O-methyl cytidine phosphorothioate
  modified_base 2: mod_base = OTHER; note = 2'-fluoro cytidine phosphorothioate
  modified_base 3: mod_base = OTHER; note = 2'O-methyl cytidine
  modified_base 4: mod_base = OTHER; note = 2'-fluoro adenosine
  modified_base 5: mod_base = OTHER; note = 2'O-methyl uridine
  modified_base 6: mod_base = OTHER; note = 2'-fluoro cytidine
  modified_base 7: mod_base = OTHER; note = 2'O-methyl adenosine
  modified_base 8: mod_base = OTHER; note = 2'-fluoro guanosine
  modified_base 9: mod_base = OTHER; note = 2'O-methyl adenosine
  modified_base 10: mod_base = OTHER; note = 2'-fluoro cytidine
  modified_base 11: mod_base = OTHER; note = 2'O-methyl adenosine
  modified_base 12: mod_base = OTHER; note = 2'-fluoro cytidine
  modified_base 13: mod_base = OTHER; note = 2'O-methyl uridine
  modified_base 14: mod_base = OTHER; note = 2'-fluoro cytidine
  modified_base 15: mod_base = OTHER; note = 2'O-methyl uridine
  modified_base 16: mod_base = OTHER; note = 2'-fluoro guanosine
  modified_base 17: mod_base = OTHER; note = 2'O-methyl guanosine
  modified_base 18: mod_base = OTHER; note = 2'-fluoro uridine
  modified_base 19: mod_base = OTHER; note = 2'O-methyl adenosine phosphorothioate
  modified_base 20: mod_base = OTHER; note = 2'O-methyl uridine phosphorothioate
  modified_base 21: mod_base = OTHER; note = 2'O-methyl uridine
cccatcagacactctggtatt

SEQ ID NO: 1569 - RNA, 21 nt, synthetic construct
  source 1..21: mol_type = other RNA
  modified_base 1: mod_base = OTHER; note = 2'O-methyl uridine phosphorothioate
  modified_base 2: mod_base = OTHER; note = 2'-fluoro uridine phosphorothioate
  modified_base 3: mod_base = OTHER; note = 2'O-methyl uridine
  modified_base 4: mod_base = OTHER; note = 2'-fluoro uridine
  modified_base 5: mod_base = OTHER; note = 2'O-methyl cytidine
  modified_base 6: mod_base = OTHER; note = 2'-fluoro cytidine
  modified_base 7: mod_base = OTHER; note = 2'O-methyl cytidine
  modified_base 8: mod_base = OTHER; note = 2'-fluoro cytidine
  modified_base 9: mod_base = OTHER; note = 2'O-methyl adenosine
  modified_base 10: mod_base = OTHER; note = 2'-fluoro uridine
  modified_base 11: mod_base = OTHER; note = 2'O-methyl cytidine
  modified_base 12: mod_base = OTHER; note = 2'-fluoro adenosine
  modified_base 13: mod_base = OTHER; note = 2'O-methyl guanosine
  modified_base 14: mod_base = OTHER; note = 2'-fluoro adenosine
  modified_base 15: mod_base = OTHER; note = 2'O-methyl cytidine
  modified_base 16: mod_base = OTHER; note = 2'-fluoro adenosine
  modified_base 17: mod_base = OTHER; note = 2'O-methyl cytidine
  modified_base 18: mod_base = OTHER; note = 2'-fluoro uridine
  modified_base 19: mod_base = OTHER; note = 2'O-methyl cytidine phosphorothioate
  modified_base 20: mod_base = OTHER; note = 2'O-methyl uridine phosphorothioate
  modified_base 21: mod_base = OTHER; note = 2'O-methyl uridine
ttttccccatcagacactctt

SEQ ID NO: 1570 - RNA, 21 nt, synthetic construct
  source 1..21: mol_type = other RNA
  modified_base 1: mod_base = OTHER; note = 2'O-methyl cytidine phosphorothioate
  modified_base 2: mod_base = OTHER; note = 2'-fluoro guanosine phosphorothioate
  modified_base 3: mod_base = OTHER; note = 2'O-methyl uridine
  modified_base 4: mod_base = OTHER; note = 2'-fluoro uridine
  modified_base 5: mod_base = OTHER; note = 2'O-methyl uridine
  modified_base 6: mod_base = OTHER; note = 2'-fluoro uridine
  modified_base 7: mod_base = OTHER; note = 2'O-methyl cytidine
  modified_base 8: mod_base = OTHER; note = 2'-fluoro cytidine
  modified_base 9: mod_base = OTHER; note = 2'O-methyl cytidine
  modified_base 10: mod_base = OTHER; note = 2'-fluoro cytidine
  modified_base 11: mod_base = OTHER; note = 2'O-methyl adenosine
  modified_base 12: mod_base = OTHER; note = 2'-fluoro uridine
  modified_base 13: mod_base = OTHER; note = 2'O-methyl cytidine
  modified_base 14: mod_base = OTHER; note = 2'-fluoro adenosine
  modified_base 15: mod_base = OTHER; note = 2'O-methyl guanosine
  modified_base 16: mod_base = OTHER; note = 2'-fluoro adenosine
  modified_base 17: mod_base = OTHER; note = 2'O-methyl cytidine
  modified_base 18: mod_base = OTHER; note = 2'-fluoro adenosine
  modified_base 19: mod_base = OTHER; note = 2'O-methyl cytidine phosphorothioate
  modified_base 20: mod_base = OTHER; note = 2'O-methyl uridine phosphorothioate
  modified_base 21: mod_base = OTHER; note = 2'O-methyl uridine
cgttttccccatcagacactt

SEQ ID NO: 1571 - RNA, 21 nt, synthetic construct
  source 1..21: mol_type = other RNA
  modified_base 1: mod_base = OTHER; note = 2'O-methyl adenosine phosphorothioate
  modified_base 2: mod_base = OTHER; note = 2'-fluoro cytidine phosphorothioate
  modified_base 3: mod_base = OTHER; note = 2'O-methyl guanosine
  modified_base 4: mod_base = OTHER; note = 2'-fluoro uridine
  modified_base 5: mod_base = OTHER; note = 2'O-methyl uridine
  modified_base 6: mod_base = OTHER; note = 2'-fluoro uridine
  modified_base 7: mod_base = OTHER; note = 2'O-methyl uridine
  modified_base 8: mod_base = OTHER; note = 2'-fluoro cytidine
  modified_base 9: mod_base = OTHER; note = 2'O-methyl cytidine
  modified_base 10: mod_base = OTHER; note = 2'-fluoro cytidine
  modified_base 11: mod_base = OTHER; note = 2'O-methyl cytidine
  modified_base 12: mod_base = OTHER; note = 2'-fluoro adenosine
  modified_base 13: mod_base = OTHER; note = 2'O-methyl uridine
  modified_base 14: mod_base = OTHER; note = 2'-fluoro cytidine
  modified_base 15: mod_base = OTHER; note = 2'O-methyl adenosine
  modified_base 16: mod_base = OTHER; note = 2'-fluoro guanosine
  modified_base 17: mod_base = OTHER; note = 2'O-methyl adenosine
  modified_base 18: mod_base = OTHER; note = 2'-fluoro cytidine
  modified_base 19: mod_base = OTHER; note = 2'O-methyl adenosine phosphorothioate
  modified_base 20: mod_base = OTHER; note = 2'O-methyl uridine phosphorothioate
  modified_base 21: mod_base = OTHER; note = 2'O-methyl uridine
acgttttccccatcagacatt

SEQ ID NO: 1572 - RNA, 21 nt, synthetic construct
  source 1..21: mol_type = other RNA
  modified_base 1: mod_base = OTHER; note = 2'O-methyl adenosine phosphorothioate
  modified_base 2: mod_base = OTHER; note = 2'-fluoro adenosine phosphorothioate
  modified_base 3: mod_base = OTHER; note = 2'O-methyl cytidine
  modified_base 4: mod_base = OTHER; note = 2'-fluoro guanosine
  modified_base 5: mod_base = OTHER; note = 2'O-methyl uridine
  modified_base 6: mod_base = OTHER; note = 2'-fluoro uridine
  modified_base 7: mod_base = OTHER; note = 2'O-methyl uridine
  modified_base 8: mod_base = OTHER; note = 2'-fluoro uridine
  modified_base 9: mod_base = OTHER; note = 2'O-methyl cytidine
  modified_base 10: mod_base = OTHER; note = 2'-fluoro cytidine
  modified_base 11: mod_base = OTHER; note = 2'O-methyl cytidine
  modified_base 12: mod_base = OTHER; note = 2'-fluoro cytidine
  modified_base 13: mod_base = OTHER; note = 2'O-methyl adenosine
  modified_base 14: mod_base = OTHER; note = 2'-fluoro uridine
  modified_base 15: mod_base = OTHER; note = 2'O-methyl cytidine
  modified_base 16: mod_base = OTHER; note = 2'-fluoro adenosine
  modified_base 17: mod_base = OTHER; note = 2'O-methyl guanosine
  modified_base 18: mod_base = OTHER; note = 2'-fluoro adenosine
  modified_base 19: mod_base = OTHER; note = 2'O-methyl cytidine phosphorothioate
  modified_base 20: mod_base = OTHER; note = 2'O-methyl uridine phosphorothioate
  modified_base 21: mod_base = OTHER; note = 2'O-methyl uridine
aacgttttccccatcagactt

SEQ ID NO: 1573 - RNA, 21 nt, synthetic construct
  source 1..21: mol_type = other RNA
  modified_base 1: mod_base = OTHER; note = 2'O-methyl guanosine phosphorothioate
  modified_base 2: mod_base = OTHER; note = 2'-fluoro adenosine phosphorothioate
  modified_base 3: mod_base = OTHER; note = 2'O-methyl adenosine
  modified_base 4: mod_base = OTHER; note = 2'-fluoro cytidine
  modified_base 5: mod_base = OTHER; note = 2'O-methyl guanosine
  modified_base 6: mod_base = OTHER; note = 2'-fluoro uridine
  modified_base 7: mod_base = OTHER; note = 2'O-methyl uridine
  modified_base 8: mod_base = OTHER; note = 2'-fluoro uridine
  modified_base 9: mod_base = OTHER; note = 2'O-methyl uridine
  modified_base 10: mod_base = OTHER; note = 2'-fluoro cytidine
  modified_base 11: mod_base = OTHER; note = 2'O-methyl cytidine
  modified_base 12: mod_base = OTHER; note = 2'-fluoro cytidine
  modified_base 13: mod_base = OTHER; note = 2'O-methyl cytidine
  modified_base 14: mod_base = OTHER; note = 2'-fluoro adenosine
  modified_base 15: mod_base = OTHER; note = 2'O-methyl uridine
  modified_base 16: mod_base = OTHER; note = 2'-fluoro cytidine
  modified_base 17: mod_base = OTHER; note = 2'O-methyl adenosine
  modified_base 18: mod_base = OTHER; note = 2'-fluoro guanosine
  modified_base 19: mod_base = OTHER; note = 2'O-methyl adenosine phosphorothioate
  modified_base 20: mod_base = OTHER; note = 2'O-methyl uridine phosphorothioate
  modified_base 21: mod_base = OTHER; note = 2'O-methyl uridine
gaacgttttccccatcagatt

SEQ ID NO: 1574 - RNA, 21 nt, synthetic construct
  source 1..21: mol_type = other RNA
  modified_base 1: mod_base = OTHER; note = 2'O-methyl adenosine phosphorothioate
  modified_base 2: mod_base = OTHER; note = 2'-fluoro guanosine phosphorothioate
  modified_base 3: mod_base = OTHER; note = 2'O-methyl adenosine
  modified_base 4: mod_base = OTHER; note = 2'-fluoro adenosine
  modified_base 5: mod_base = OTHER; note = 2'O-methyl cytidine
  modified_base 6: mod_base = OTHER; note = 2'-fluoro guanosine
  modified_base 7: mod_base = OTHER; note = 2'O-methyl uridine
  modified_base 8: mod_base = OTHER; note = 2'-fluoro uridine
  modified_base 9: mod_base = OTHER; note = 2'O-methyl uridine
  modified_base 10: mod_base = OTHER; note = 2'-fluoro uridine
  modified_base 11: mod_base = OTHER; note = 2'O-methyl cytidine
  modified_base 12: mod_base = OTHER; note = 2'-fluoro cytidine
  modified_base 13: mod_base = OTHER; note = 2'O-methyl cytidine
  modified_base 14: mod_base = OTHER; note = 2'-fluoro cytidine
  modified_base 15: mod_base = OTHER; note = 2'O-methyl adenosine
  modified_base 16: mod_base = OTHER; note = 2'-fluoro uridine
  modified_base 17: mod_base = OTHER; note = 2'O-methyl cytidine
  modified_base 18: mod_base = OTHER; note = 2'-fluoro adenosine
  modified_base 19: mod_base = OTHER; note = 2'O-methyl guanosine phosphorothioate
  modified_base 20: mod_base = OTHER; note = 2'O-methyl uridine phosphorothioate
  modified_base 21: mod_base = OTHER; note = 2'O-methyl uridine
agaacgttttccccatcagtt

SEQ ID NO: 1575 - RNA, 21 nt, synthetic construct
  source 1..21: mol_type = other RNA
  modified_base 1: mod_base = OTHER; note = 2'O-methyl cytidine phosphorothioate
  modified_base 2: mod_base = OTHER; note = 2'-fluoro adenosine phosphorothioate
  modified_base 3: mod_base = OTHER; note = 2'O-methyl guanosine
  modified_base 4: mod_base = OTHER; note = 2'-fluoro adenosine
  modified_base 5: mod_base = OTHER; note = 2'O-methyl adenosine
  modified_base 6: mod_base = OTHER; note = 2'-fluoro cytidine
  modified_base 7: mod_base = OTHER; note = 2'O-methyl guanosine
  modified_base 8: mod_base = OTHER; note = 2'-fluoro uridine
  modified_base 9: mod_base = OTHER; note = 2'O-methyl uridine
  modified_base 10: mod_base = OTHER; note = 2'-fluoro uridine
  modified_base 11: mod_base = OTHER; note = 2'O-methyl uridine
  modified_base 12: mod_base = OTHER; note = 2'-fluoro cytidine
  modified_base 13: mod_base = OTHER; note = 2'O-methyl cytidine
  modified_base 14: mod_base = OTHER; note = 2'-fluoro cytidine
  modified_base 15: mod_base = OTHER; note = 2'O-methyl cytidine
  modified_base 16: mod_base = OTHER; note = 2'-fluoro adenosine
  modified_base 17: mod_base = OTHER; note = 2'O-methyl uridine
  modified_base 18: mod_base = OTHER; note = 2'-fluoro cytidine
  modified_base 19: mod_base = OTHER; note = 2'O-methyl adenosine phosphorothioate
  modified_base 20: mod_base = OTHER; note = 2'O-methyl uridine phosphorothioate
  modified_base 21: mod_base = OTHER; note = 2'O-methyl uridine
cagaacgttttccccatcatt

SEQ ID NO: 1576 - RNA, 21 nt, synthetic construct
  source 1..21: mol_type = other RNA
  modified_base 1: mod_base = OTHER; note = 2'O-methyl cytidine phosphorothioate
  modified_base 2: mod_base = OTHER; note = 2'-fluoro cytidine phosphorothioate
  modified_base 3: mod_base = OTHER; note = 2'O-methyl adenosine
  modified_base 4: mod_base = OTHER; note = 2'-fluoro guanosine
  modified_base 5: mod_base = OTHER; note = 2'O-methyl adenosine
  modified_base 6: mod_base = OTHER; note = 2'-fluoro adenosine
  modified_base 7: mod_base = OTHER; note = 2'O-methyl cytidine
  modified_base 8: mod_base = OTHER; note = 2'-fluoro guanosine
  modified_base 9: mod_base = OTHER; note = 2'O-methyl uridine
  modified_base 10: mod_base = OTHER; note = 2'-fluoro uridine
  modified_base 11: mod_base = OTHER; note = 2'O-methyl uridine
  modified_base 12: mod_base = OTHER; note = 2'-fluoro uridine
  modified_base 13: mod_base = OTHER; note = 2'O-methyl cytidine
  modified_base 14: mod_base = OTHER; note = 2'-fluoro cytidine
  modified_base 15: mod_base = OTHER; note = 2'O-methyl cytidine
  modified_base 16: mod_base = OTHER; note = 2'-fluoro cytidine
  modified_base 17: mod_base = OTHER; note = 2'O-methyl adenosine
  modified_base 18: mod_base = OTHER; note = 2'-fluoro uridine
  modified_base 19: mod_base = OTHER; note = 2'O-methyl cytidine phosphorothioate
  modified_base 20: mod_base = OTHER; note = 2'O-methyl uridine phosphorothioate
  modified_base 21: mod_base = OTHER; note = 2'O-methyl uridine
ccagaacgttttccccatctt

SEQ ID NO: 1577 - RNA, 21 nt, synthetic construct
  source 1..21: mol_type = other RNA
  modified_base 1: mod_base = OTHER; note = 2'O-methyl cytidine phosphorothioate
  modified_base 2: mod_base = OTHER; note = 2'-fluoro adenosine phosphorothioate
  modified_base 3: mod_base = OTHER; note = 2'O-methyl cytidine
  modified_base 4: mod_base = OTHER; note = 2'-fluoro cytidine
  modified_base 5: mod_base = OTHER; note = 2'O-methyl adenosine
  modified_base 6: mod_base = OTHER; note = 2'-fluoro guanosine
  modified_base 7: mod_base = OTHER; note = 2'O-methyl adenosine
  modified_base 8: mod_base = OTHER; note = 2'-fluoro adenosine
  modified_base 9: mod_base = OTHER; note = 2'O-methyl cytidine
  modified_base 10: mod_base = OTHER; note = 2'-fluoro guanosine
  modified_base 11: mod_base = OTHER; note = 2'O-methyl uridine
  modified_base 12: mod_base = OTHER; note = 2'-fluoro uridine
  modified_base 13: mod_base = OTHER; note = 2'O-methyl uridine
  modified_base 14: mod_base = OTHER; note = 2'-fluoro uridine
  modified_base 15: mod_base = OTHER; note = 2'O-methyl cytidine
  modified_base 16: mod_base = OTHER; note = 2'-fluoro cytidine
  modified_base 17: mod_base = OTHER; note = 2'O-methyl cytidine
  modified_base 18: mod_base = OTHER; note = 2'-fluoro cytidine
  modified_base 19: mod_base = OTHER; note = 2'O-methyl adenosine phosphorothioate
  modified_base 20: mod_base = OTHER; note = 2'O-methyl uridine phosphorothioate
  modified_base 21: mod_base = OTHER; note = 2'O-methyl uridine
caccagaacgttttccccatt

SEQ ID NO: 1578 - RNA, 21 nt, synthetic construct
  source 1..21: mol_type = other RNA
  modified_base 1: mod_base = OTHER; note = 2'O-methyl guanosine phosphorothioate
  modified_base 2: mod_base = OTHER; note = 2'-fluoro adenosine phosphorothioate
  modified_base 3: mod_base = OTHER; note = 2'O-methyl cytidine
  modified_base 4: mod_base = OTHER; note = 2'-fluoro adenosine
  modified_base 5: mod_base = OTHER; note = 2'O-methyl cytidine
  modified_base 6: mod_base = OTHER; note = 2'-fluoro cytidine
  modified_base 7: mod_base = OTHER; note = 2'O-methyl adenosine
  modified_base 8: mod_base = OTHER; note = 2'-fluoro guanosine
  modified_base 9: mod_base = OTHER; note = 2'O-methyl adenosine
  modified_base 10: mod_base = OTHER; note = 2'-fluoro adenosine
  modified_base 11: mod_base = OTHER; note = 2'O-methyl cytidine
  modified_base 12: mod_base = OTHER; note = 2'-fluoro guanosine
  modified_base 13: mod_base = OTHER; note = 2'O-methyl uridine
  modified_base 14: mod_base = OTHER; note = 2'-fluoro uridine
  modified_base 15: mod_base = OTHER; note = 2'O-methyl uridine
  modified_base 16: mod_base = OTHER; note = 2'-fluoro uridine
  modified_base 17: mod_base = OTHER; note = 2'O-methyl cytidine
  modified_base 18: mod_base = OTHER; note = 2'-fluoro cytidine
  modified_base 19: mod_base = OTHER; note = 2'O-methyl cytidine phosphorothioate
  modified_base 20: mod_base = OTHER; note = 2'O-methyl uridine phosphorothioate
  modified_base 21: mod_base = OTHER; note = 2'O-methyl uridine
gacaccagaacgttttccctt

SEQ ID NO: 1579 - RNA, 21 nt, synthetic construct
  source 1..21: mol_type = other RNA
  modified_base 1: mod_base = OTHER; note = 2'O-methyl adenosine phosphorothioate
  modified_base 2: mod_base = OTHER; note = 2'-fluoro guanosine phosphorothioate
  modified_base 3: mod_base = OTHER; note = 2'O-methyl adenosine
  modified_base 4: mod_base = OTHER; note = 2'-fluoro cytidine
  modified_base 5: mod_base = OTHER; note = 2'O-methyl adenosine
  modified_base 6: mod_base = OTHER; note = 2'-fluoro cytidine
  modified_base 7: mod_base = OTHER; note = 2'O-methyl cytidine
  modified_base 8: mod_base = OTHER; note = 2'-fluoro adenosine
  modified_base 9: mod_base = OTHER; note = 2'O-methyl guanosine
  modified_base 10: mod_base = OTHER; note = 2'-fluoro adenosine
  modified_base 11: mod_base = OTHER; note = 2'O-methyl adenosine
  modified_base 12: mod_base = OTHER; note = 2'-fluoro cytidine
  modified_base 13: mod_base = OTHER; note = 2'O-methyl guanosine
  modified_base 14: mod_base = OTHER; note = 2'-fluoro uridine
  modified_base 15: mod_base = OTHER; note = 2'O-methyl uridine
  modified_base 16: mod_base = OTHER; note = 2'-fluoro uridine
  modified_base 17: mod_base = OTHER; note = 2'O-methyl uridine
  modified_base 18: mod_base = OTHER; note = 2'-fluoro cytidine
  modified_base 19: mod_base = OTHER; note = 2'O-methyl cytidine phosphorothioate
  modified_base 20: mod_base = OTHER; note = 2'O-methyl uridine phosphorothioate
  modified_base 21: mod_base = OTHER; note = 2'O-methyl uridine
agacaccagaacgttttcctt

SEQ ID NO: 1580 - RNA, 21 nt, synthetic construct
  source 1..21: mol_type = other RNA
  modified_base 1: mod_base = OTHER; note = 2'O-methyl guanosine phosphorothioate
  modified_base 2: mod_base = OTHER; note = 2'-fluoro uridine phosphorothioate
  modified_base 3: mod_base = OTHER; note = 2'O-methyl cytidine
  modified_base 4: mod_base = OTHER; note = 2'-fluoro adenosine
  modified_base 5: mod_base = OTHER; note = 2'O-methyl guanosine
  modified_base 6: mod_base = OTHER; note = 2'-fluoro adenosine
  modified_base 7: mod_base = OTHER; note = 2'O-methyl cytidine
  modified_base 8: mod_base = OTHER; note = 2'-fluoro adenosine
  modified_base 9: mod_base = OTHER; note = 2'O-methyl cytidine
  modified_base 10: mod_base = OTHER; note = 2'-fluoro cytidine
  modified_base 11: mod_base = OTHER; note = 2'O-methyl adenosine
  modified_base 12: mod_base = OTHER; note = 2'-fluoro guanosine
  modified_base 13: mod_base = OTHER; note = 2'O-methyl adenosine
  modified_base 14: mod_base = OTHER; note = 2'-fluoro adenosine
  modified_base 15: mod_base = OTHER; note = 2'O-methyl cytidine
  modified_base 16: mod_base = OTHER; note = 2'-fluoro guanosine
  modified_base 17: mod_base = OTHER; note = 2'O-methyl uridine
  modified_base 18: mod_base = OTHER; note = 2'-fluoro uridine
  modified_base 19: mod_base = OTHER; note = 2'O-methyl uridine phosphorothioate
  modified_base 20: mod_base = OTHER; note = 2'O-methyl uridine phosphorothioate
  modified_base 21: mod_base = OTHER; note = 2'O-methyl uridine
gtcagacaccagaacgttttt

SEQ ID NO: 1581 - RNA, 21 nt, synthetic construct
  source 1..21: mol_type = other RNA
  modified_base 1: mod_base = OTHER; note = 2'O-methyl adenosine phosphorothioate
  modified_base 2: mod_base = OTHER; note = 2'-fluoro guanosine phosphorothioate
  modified_base 3: mod_base = OTHER; note = 2'O-methyl uridine
  modified_base 4: mod_base = OTHER; note = 2'-fluoro cytidine
  modified_base 5: mod_base = OTHER; note = 2'O-methyl adenosine
  modified_base 6: mod_base = OTHER; note = 2'-fluoro guanosine
  modified_base 7: mod_base = OTHER; note = 2'O-methyl adenosine
  modified_base 8: mod_base = OTHER; note = 2'-fluoro cytidine
  modified_base 9: mod_base = OTHER; note = 2'O-methyl adenosine
  modified_base 10: mod_base = OTHER; note = 2'-fluoro cytidine
  modified_base 11: mod_base = OTHER; note = 2'O-methyl cytidine
  modified_base 12: mod_base = OTHER; note = 2'-fluoro adenosine
  modified_base 13: mod_base = OTHER; note = 2'O-methyl guanosine
  modified_base 14: mod_base = OTHER; note = 2'-fluoro adenosine
  modified_base 15: mod_base = OTHER; note = 2'O-methyl adenosine
  modified_base 16: mod_base = OTHER; note = 2'-fluoro cytidine
  modified_base 17: mod_base = OTHER; note = 2'O-methyl guanosine
  modified_base 18: mod_base = OTHER; note = 2'-fluoro uridine
  modified_base 19: mod_base = OTHER; note = 2'O-methyl uridine phosphorothioate
  modified_base 20: mod_base = OTHER; note = 2'O-methyl uridine phosphorothioate
  modified_base 21: mod_base = OTHER; note = 2'O-methyl uridine
agtcagacaccagaacgtttt

SEQ ID NO: 1582 - RNA, 21 nt, synthetic construct
  source 1..21: mol_type = other RNA
  modified_base 1: mod_base = OTHER; note = 2'O-methyl adenosine phosphorothioate
  modified_base 2: mod_base = OTHER; note = 2'-fluoro adenosine phosphorothioate
  modified_base 3: mod_base = OTHER; note = 2'O-methyl guanosine
  modified_base 4: mod_base = OTHER; note = 2'-fluoro uridine
  modified_base 5: mod_base = OTHER; note = 2'O-methyl cytidine
  modified_base 6: mod_base = OTHER; note = 2'-fluoro adenosine
  modified_base 7: mod_base = OTHER; note = 2'O-methyl guanosine
  modified_base 8: mod_base = OTHER; note = 2'-fluoro adenosine
  modified_base 9: mod_base = OTHER; note = 2'O-methyl cytidine
  modified_base 10: mod_base = OTHER; note = 2'-fluoro adenosine
  modified_base 11: mod_base = OTHER; note = 2'O-methyl cytidine
  modified_base 12: mod_base = OTHER; note = 2'-fluoro cytidine
  modified_base 13: mod_base = OTHER; note = 2'O-methyl adenosine
  modified_base 14: mod_base = OTHER; note = 2'-fluoro guanosine
  modified_base 15: mod_base = OTHER; note = 2'O-methyl adenosine
  modified_base 16: mod_base = OTHER; note = 2'-fluoro adenosine
  modified_base 17: mod_base = OTHER; note = 2'O-methyl cytidine
  modified_base 18: mod_base = OTHER; note = 2'-fluoro guanosine
  modified_base 19: mod_base = OTHER; note = 2'O-methyl uridine phosphorothioate
  modified_base 20: mod_base = OTHER; note = 2'O-methyl uridine phosphorothioate
  modified_base 21: mod_base = OTHER; note = 2'O-methyl uridine
aagtcagacaccagaacgttt

SEQ ID NO: 1583 - RNA, 21 nt, synthetic construct
  source 1..21: mol_type = other RNA
  modified_base 1: mod_base = OTHER; note = 2'O-methyl adenosine phosphorothioate
  modified_base 2: mod_base = OTHER; note = 2'-fluoro adenosine phosphorothioate
  modified_base 3: mod_base = OTHER; note = 2'O-methyl adenosine
  modified_base 4: mod_base = OTHER; note = 2'-fluoro guanosine
  modified_base 5: mod_base = OTHER; note = 2'O-methyl uridine
  modified_base 6: mod_base = OTHER; note = 2'-fluoro cytidine
  modified_base 7: mod_base = OTHER; note = 2'O-methyl adenosine
  modified_base 8: mod_base = OTHER; note = 2'-fluoro guanosine
  modified_base 9: mod_base = OTHER; note = 2'O-methyl adenosine
  modified_base 10: mod_base = OTHER; note = 2'-fluoro cytidine
  modified_base 11: mod_base = OTHER; note = 2'O-methyl adenosine
  modified_base 12: mod_base = OTHER; note = 2'-fluoro cytidine
  modified_base 13: mod_base = OTHER; note = 2'O-methyl cytidine
  modified_base 14: mod_base = OTHER; note = 2'-fluoro adenosine
  modified_base 15: mod_base = OTHER; note = 2'O-methyl guanosine
  modified_base 16: mod_base = OTHER; note = 2'-fluoro adenosine
  modified_base 17: mod_base = OTHER; note = 2'O-methyl adenosine
  modified_base 18: mod_base = OTHER; note = 2'-fluoro cytidine
  modified_base 19: mod_base = OTHER; note = 2'O-methyl guanosine phosphorothioate
  modified_base 20: mod_base = OTHER; note = 2'O-methyl uridine phosphorothioate
  modified_base 21: mod_base = OTHER; note = 2'O-methyl uridine
aaagtcagacaccagaacgtt

SEQ ID NO: 1584 - RNA, 21 nt, synthetic construct
  source 1..21: mol_type = other RNA
  modified_base 1: mod_base = OTHER; note = 2'O-methyl guanosine phosphorothioate
  modified_base 2: mod_base = OTHER; note = 2'-fluoro adenosine phosphorothioate
  modified_base 3: mod_base = OTHER; note = 2'O-methyl adenosine
  modified_base 4: mod_base = OTHER; note = 2'-fluoro adenosine
  modified_base 5: mod_base = OTHER; note = 2'O-methyl guanosine
  modified_base 6: mod_base = OTHER; note = 2'-fluoro uridine
  modified_base 7: mod_base = OTHER; note = 2'O-methyl cytidine
  modified_base 8: mod_base = OTHER; note = 2'-fluoro adenosine
  modified_base 9: mod_base = OTHER; note = 2'O-methyl guanosine
  modified_base 10: mod_base = OTHER; note = 2'-fluoro adenosine
  modified_base 11: mod_base = OTHER; note = 2'O-methyl cytidine
  modified_base 12: mod_base = OTHER; note = 2'-fluoro adenosine
  modified_base 13: mod_base = OTHER; note = 2'O-methyl cytidine
  modified_base 14: mod_base = OTHER; note = 2'-fluoro cytidine
  modified_base 15: mod_base = OTHER; note = 2'O-methyl adenosine
  modified_base 16: mod_base = OTHER; note = 2'-fluoro guanosine
  modified_base 17: mod_base = OTHER; note = 2'O-methyl adenosine
  modified_base 18: mod_base = OTHER; note = 2'-fluoro adenosine
  modified_base 19: mod_base = OTHER; note = 2'O-methyl cytidine phosphorothioate
  modified_base 20: mod_base = OTHER; note = 2'O-methyl uridine phosphorothioate
  modified_base 21: mod_base = OTHER; note = 2'O-methyl uridine
gaaagtcagacaccagaactt

SEQ ID NO: 1585 - RNA, 21 nt, synthetic construct
  source 1..21: mol_type = other RNA
  modified_base 1: mod_base = OTHER; note = 2'O-methyl cytidine phosphorothioate
  modified_base 2: mod_base = OTHER; note = 2'-fluoro guanosine phosphorothioate
  modified_base 3: mod_base = OTHER; note = 2'O-methyl adenosine
  modified_base 4: mod_base = OTHER; note = 2'-fluoro adenosine
  modified_base 5: mod_base = OTHER; note = 2'O-methyl adenosine
  modified_base 6: mod_base = OTHER; note = 2'-fluoro guanosine
  modified_base 7: mod_base = OTHER; note = 2'O-methyl uridine
  modified_base 8: mod_base = OTHER; note = 2'-fluoro cytidine
  modified_base 9: mod_base = OTHER; note = 2'O-methyl adenosine
  modified_base 10: mod_base = OTHER; note = 2'-fluoro guanosine
  modified_base 11: mod_base = OTHER; note = 2'O-methyl adenosine
  modified_base 12: mod_base = OTHER; note = 2'-fluoro cytidine
  modified_base 13: mod_base = OTHER; note = 2'O-methyl adenosine
  modified_base 14: mod_base = OTHER; note = 2'-fluoro cytidine
  modified_base 15: mod_base = OTHER; note = 2'O-methyl cytidine
  modified_base 16: mod_base = OTHER; note = 2'-fluoro adenosine
  modified_base 17: mod_base = OTHER; note = 2'O-methyl guanosine
  modified_base 18: mod_base = OTHER; note = 2'-fluoro adenosine
  modified_base 19: mod_base = OTHER; note = 2'O-methyl adenosine phosphorothioate
  modified_base 20: mod_base = OTHER; note = 2'O-methyl uridine phosphorothioate
  modified_base 21: mod_base = OTHER; note = 2'O-methyl uridine
cgaaagtcagacaccagaatt

SEQ ID NO: 1586 - RNA, 21 nt, synthetic construct
  source 1..21: mol_type = other RNA
  modified_base 1: mod_base = OTHER; note = 2'O-methyl adenosine phosphorothioate
  modified_base 2: mod_base = OTHER; note = 2'-fluoro cytidine phosphorothioate
  modified_base 3: mod_base = OTHER; note = 2'O-methyl cytidine
  modified_base 4: mod_base = OTHER; note = 2'-fluoro guanosine
  modified_base 5: mod_base = OTHER; note = 2'O-methyl adenosine
  modified_base 6: mod_base = OTHER; note = 2'-fluoro adenosine
  modified_base 7: mod_base = OTHER; note = 2'O-methyl adenosine
  modified_base 8: mod_base = OTHER; note = 2'-fluoro guanosine
  modified_base 9: mod_base = OTHER; note = 2'O-methyl uridine
  modified_base 10: mod_base = OTHER; note = 2'-fluoro cytidine
  modified_base 11: mod_base = OTHER; note = 2'O-methyl adenosine
  modified_base 12: mod_base = OTHER; note = 2'-fluoro guanosine
  modified_base 13: mod_base = OTHER; note = 2'O-methyl adenosine
  modified_base 14: mod_base = OTHER; note = 2'-fluoro cytidine
  modified_base 15: mod_base = OTHER; note = 2'O-methyl adenosine
  modified_base 16: mod_base = OTHER; note = 2'-fluoro cytidine
  modified_base 17: mod_base = OTHER; note = 2'O-methyl cytidine
  modified_base 18: mod_base = OTHER; note = 2'-fluoro adenosine
  modified_base 19: mod_base = OTHER; note = 2'O-methyl guanosine phosphorothioate
  modified_base 20: mod_base = OTHER; note = 2'O-methyl uridine phosphorothioate
  modified_base 21: mod_base = OTHER; note = 2'O-methyl uridine
accgaaagtcagacaccagtt

SEQ ID NO: 1587 - RNA, 21 nt, synthetic construct
  source 1..21: mol_type = other RNA
  modified_base 1: mod_base = OTHER; note = 2'O-methyl guanosine phosphorothioate
  modified_base 2: mod_base = OTHER; note = 2'-fluoro adenosine phosphorothioate
  modified_base 3: mod_base = OTHER; note = 2'O-methyl cytidine
  modified_base 4: mod_base = OTHER; note = 2'-fluoro cytidine
  modified_base 5: mod_base = OTHER; note = 2'O-methyl guanosine
  modified_base 6: mod_base = OTHER; note = 2'-fluoro adenosine
  modified_base 7: mod_base = OTHER; note = 2'O-methyl adenosine
  modified_base 8: mod_base = OTHER; note = 2'-fluoro adenosine
  modified_base 9: mod_base = OTHER; note = 2'O-methyl guanosine
  modified_base 10: mod_base = OTHER; note = 2'-fluoro uridine
  modified_base 11: mod_base = OTHER; note = 2'O-methyl cytidine
  modified_base 12: mod_base = OTHER; note = 2'-fluoro adenosine
  modified_base 13: mod_base = OTHER; note = 2'O-methyl guanosine
  modified_base 14: mod_base = OTHER; note = 2'-fluoro adenosine
  modified_base 15: mod_base = OTHER; note = 2'O-methyl cytidine
  modified_base 16: mod_base = OTHER; note = 2'-fluoro adenosine
  modified_base 17: mod_base = OTHER; note = 2'O-methyl cytidine
  modified_base 18: mod_base = OTHER; note = 2'-fluoro cytidine
  modified_base 19: mod_base = OTHER; note = 2'O-methyl adenosine phosphorothioate
  modified_base 20: mod_base = OTHER; note = 2'O-methyl uridine phosphorothioate
  modified_base 21: mod_base = OTHER; note = 2'O-methyl uridine
gaccgaaagtcagacaccatt

SEQ ID NO: 1588 - RNA, 21 nt, synthetic construct
  source 1..21: mol_type = other RNA
  modified_base 1: mod_base = OTHER; note = 2'O-methyl guanosine phosphorothioate
  modified_base 2: mod_base = OTHER; note = 2'-fluoro guanosine phosphorothioate
  modified_base 3: mod_base = OTHER; note = 2'O-methyl adenosine
  modified_base 4: mod_base = OTHER; note = 2'-fluoro cytidine
  modified_base 5: mod_base = OTHER; note = 2'O-methyl cytidine
  modified_base 6: mod_base = OTHER; note = 2'-fluoro guanosine
  modified_base 7: mod_base = OTHER; note = 2'O-methyl adenosine
  modified_base 8: mod_base = OTHER; note = 2'-fluoro adenosine
  modified_base 9: mod_base = OTHER; note = 2'O-methyl adenosine
  modified_base 10: mod_base = OTHER; note = 2'-fluoro guanosine
  modified_base 11: mod_base = OTHER; note = 2'O-methyl uridine
  modified_base 12: mod_base = OTHER; note = 2'-fluoro cytidine
  modified_base 13: mod_base = OTHER; note = 2'O-methyl adenosine
  modified_base 14: mod_base = OTHER; note = 2'-fluoro guanosine
  modified_base 15: mod_base = OTHER; note = 2'O-methyl adenosine
  modified_base 16: mod_base = OTHER; note = 2'-fluoro cytidine
  modified_base 17: mod_base = OTHER; note = 2'O-methyl adenosine
  modified_base 18: mod_base = OTHER; note = 2'-fluoro cytidine
  modified_base 19: mod_base = OTHER; note = 2'O-methyl cytidine phosphorothioate
  modified_base 20: mod_base = OTHER; note = 2'O-methyl uridine phosphorothioate
  modified_base 21: mod_base = OTHER; note = 2'O-methyl uridine
ggaccgaaagtcagacacctt

SEQ ID NO: 1589 - RNA, 21 nt, synthetic construct
  source 1..21: mol_type = other RNA
  modified_base 1: mod_base = OTHER; note = 2'O-methyl uridine phosphorothioate
  modified_base 2: mod_base = OTHER; note = 2'-fluoro guanosine phosphorothioate
  modified_base 3: mod_base = OTHER; note = 2'O-methyl guanosine
  modified_base 4: mod_base = OTHER; note = 2'-fluoro adenosine
  modified_base 5: mod_base = OTHER; note = 2'O-methyl cytidine
  modified_base 6: mod_base = OTHER; note = 2'-fluoro cytidine
  modified_base 7: mod_base = OTHER; note = 2'O-methyl guanosine
  modified_base 8: mod_base = OTHER; note = 2'-fluoro adenosine
  modified_base 9: mod_base = OTHER; note = 2'O-methyl adenosine
  modified_base 10: mod_base = OTHER; note = 2'-fluoro adenosine
  modified_base 11: mod_base = OTHER; note = 2'O-methyl guanosine
  modified_base 12: mod_base = OTHER; note = 2'-fluoro uridine
  modified_base 13: mod_base = OTHER; note = 2'O-methyl cytidine
  modified_base 14: mod_base = OTHER; note = 2'-fluoro adenosine
  modified_base 15: mod_base = OTHER; note = 2'O-methyl guanosine
  modified_base 16: mod_base = OTHER; note = 2'-fluoro adenosine
  modified_base 17: mod_base = OTHER; note = 2'O-methyl cytidine
  modified_base 18: mod_base = OTHER; note = 2'-fluoro adenosine
  modified_base 19: mod_base = OTHER; note = 2'O-methyl cytidine phosphorothioate
  modified_base 20: mod_base = OTHER; note = 2'O-methyl uridine phosphorothioate
  modified_base 21: mod_base = OTHER; note = 2'O-methyl uridine
tggaccgaaagtcagacactt

SEQ ID NO: 1590 - RNA, 21 nt, synthetic construct
  source 1..21: mol_type = other RNA
  modified_base 1: mod_base = OTHER; note = 2'O-methyl uridine phosphorothioate
  modified_base 2: mod_base = OTHER; note = 2'-fluoro uridine phosphorothioate
  modified_base 3: mod_base = OTHER; note = 2'O-methyl guanosine
  modified_base 4: mod_base = OTHER; note = 2'-fluoro guanosine
  modified_base 5: mod_base = OTHER; note = 2'O-methyl adenosine
  modified_base 6: mod_base = OTHER; note = 2'-fluoro cytidine
  modified_base 7: mod_base = OTHER; note = 2'O-methyl cytidine
  modified_base 8: mod_base = OTHER; note = 2'-fluoro guanosine
  modified_base 9: mod_base = OTHER; note = 2'O-methyl adenosine
  modified_base 10: mod_base = OTHER; note = 2'-fluoro adenosine
  modified_base 11: mod_base = OTHER; note = 2'O-methyl adenosine
  modified_base 12: mod_base = OTHER; note = 2'-fluoro guanosine
  modified_base 13: mod_base = OTHER; note = 2'O-methyl uridine
  modified_base 14: mod_base = OTHER; note = 2'-fluoro cytidine
  modified_base 15: mod_base = OTHER; note = 2'O-methyl adenosine
  modified_base 16: mod_base = OTHER; note = 2'-fluoro guanosine
  modified_base 17: mod_base = OTHER; note = 2'O-methyl adenosine
  modified_base 18: mod_base = OTHER; note = 2'-fluoro cytidine
  modified_base 19: mod_base = OTHER; note = 2'O-methyl adenosine phosphorothioate
  modified_base 20: mod_base = OTHER; note = 2'O-methyl uridine phosphorothioate
  modified_base 21: mod_base = OTHER; note = 2'O-methyl uridine
ttggaccgaaagtcagacatt

SEQ ID NO: 1591 - RNA, 21 nt, synthetic construct
  source 1..21: mol_type = other RNA
  modified_base 1: mod_base = OTHER; note = 2'O-methyl uridine phosphorothioate
  modified_base 2: mod_base = OTHER; note = 2'-fluoro uridine phosphorothioate
  modified_base 3: mod_base = OTHER; note = 2'O-methyl uridine
  modified_base 4: mod_base = OTHER; note = 2'-fluoro guanosine
  modified_base 5: mod_base = OTHER; note = 2'O-methyl guanosine
  modified_base 6: mod_base = OTHER; note = 2'-fluoro adenosine
  modified_base 7: mod_base = OTHER; note = 2'O-methyl cytidine
  modified_base 8: mod_base = OTHER; note = 2'-fluoro cytidine
  modified_base 9: mod_base = OTHER; note = 2'O-methyl guanosine
  modified_base 10: mod_base = OTHER; note = 2'-fluoro adenosine
  modified_base 11: mod_base = OTHER; note = 2'O-methyl adenosine
  modified_base 12: mod_base = OTHER; note = 2'-fluoro adenosine
  modified_base 13: mod_base = OTHER; note = 2'O-methyl guanosine
  modified_base 14: mod_base = OTHER; note = 2'-fluoro uridine
  modified_base 15: mod_base = OTHER; note = 2'O-methyl cytidine
  modified_base 16: mod_base = OTHER; note = 2'-fluoro adenosine
  modified_base 17: mod_base = OTHER; note = 2'O-methyl guanosine
  modified_base 18: mod_base = OTHER; note = 2'-fluoro adenosine
  modified_base 19: mod_base = OTHER; note = 2'O-methyl cytidine phosphorothioate
  modified_base 20: mod_base = OTHER; note = 2'O-methyl uridine phosphorothioate
  modified_base 21: mod_base = OTHER; note = 2'O-methyl uridine
tttggaccgaaagtcagactt

SEQ ID NO: 1592 - RNA, 21 nt, synthetic construct
  source 1..21: mol_type = other RNA
  modified_base 1: mod_base = OTHER; note = 2'O-methyl adenosine phosphorothioate
  modified_base 2: mod_base = OTHER; note = 2'-fluoro cytidine phosphorothioate
  modified_base 3: mod_base = OTHER; note = 2'O-methyl guanosine
  modified_base 4: mod_base = OTHER; note = 2'-fluoro adenosine
  modified_base 5: mod_base = OTHER; note = 2'O-methyl cytidine
  modified_base 6: mod_base = OTHER; note = 2'-fluoro uridine
  modified_base 7: mod_base = OTHER; note = 2'O-methyl uridine
  modified_base 8: mod_base = OTHER; note = 2'-fluoro cytidine
  modified_base 9: mod_base = OTHER; note = 2'O-methyl guanosine
  modified_base 10: mod_base = OTHER; note = 2'-fluoro uridine
  modified_base 11: mod_base = OTHER; note = 2'O-methyl cytidine
  modified_base 12: mod_base = OTHER; note = 2'-fluoro uridine
  modified_base 13: mod_base = OTHER; note = 2'O-methyl uridine
  modified_base 14: mod_base = OTHER; note = 2'-fluoro uridine
  modified_base 15: mod_base = OTHER; note = 2'O-methyl guanosine
  modified_base 16: mod_base = OTHER; note = 2'-fluoro guanosine
  modified_base 17: mod_base = OTHER; note = 2'O-methyl adenosine
  modified_base 18: mod_base = OTHER; note = 2'-fluoro cytidine
  modified_base 19: mod_base = OTHER; note = 2'O-methyl cytidine phosphorothioate
  modified_base 20: mod_base = OTHER; note = 2'O-methyl uridine phosphorothioate
  modified_base 21: mod_base = OTHER; note = 2'O-methyl uridine
acgacttcgtctttggacctt

SEQ ID NO: 1593 - RNA, 21 nt, synthetic construct
  source 1..21: mol_type = other RNA
  modified_base 1: mod_base = OTHER; note = 2'O-methyl cytidine phosphorothioate
  modified_base 2: mod_base = OTHER; note = 2'-fluoro adenosine phosphorothioate
  modified_base 3: mod_base = OTHER; note = 2'O-methyl cytidine
  modified_base 4: mod_base = OTHER; note = 2'-fluoro guanosine
  modified_base 5: mod_base = OTHER; note = 2'O-methyl adenosine
  modified_base 6: mod_base = OTHER; note = 2'-fluoro cytidine
  modified_base 7: mod_base = OTHER; note = 2'O-methyl uridine
  modified_base 8: mod_base = OTHER; note = 2'-fluoro uridine
  modified_base 9: mod_base = OTHER; note = 2'O-methyl cytidine
  modified_base 10: mod_base = OTHER; note = 2'-fluoro guanosine
  modified_base 11: mod_base = OTHER; note = 2'O-methyl uridine
  modified_base 12: mod_base = OTHER; note = 2'-fluoro cytidine
  modified_base 13: mod_base = OTHER; note = 2'O-methyl uridine
  modified_base 14: mod_base = OTHER; note = 2'-fluoro uridine
  modified_base 15: mod_base = OTHER; note = 2'O-methyl uridine
  modified_base 16: mod_base = OTHER; note = 2'-fluoro guanosine
  modified_base 17: mod_base = OTHER; note = 2'O-methyl guanosine
  modified_base 18: mod_base = OTHER; note = 2'-fluoro adenosine
  modified_base 19: mod_base = OTHER; note = 2'O-methyl cytidine phosphorothioate
  modified_base 20: mod_base = OTHER; note = 2'O-methyl uridine phosphorothioate
  modified_base 21: mod_base = OTHER; note = 2'O-methyl uridine
cacgacttcgtctttggactt

SEQ ID NO: 1594 - RNA, 21 nt, synthetic construct
  source 1..21: mol_type = other RNA
  modified_base 1: mod_base = OTHER; note = 2'O-methyl cytidine phosphorothioate
  modified_base 2: mod_base = OTHER; note = 2'-fluoro cytidine phosphorothioate
  modified_base 3: mod_base = OTHER; note = 2'O-methyl adenosine
  modified_base 4: mod_base = OTHER; note = 2'-fluoro cytidine
  modified_base 5: mod_base = OTHER; note = 2'O-methyl guanosine
  modified_base 6: mod_base = OTHER; note = 2'-fluoro adenosine
  modified_base 7: mod_base = OTHER; note = 2'O-methyl cytidine
  modified_base 8: mod_base = OTHER; note = 2'-fluoro uridine
  modified_base 9: mod_base = OTHER; note = 2'O-methyl uridine
  modified_base 10: mod_base = OTHER; note = 2'-fluoro cytidine
  modified_base 11: mod_base = OTHER; note = 2'O-methyl guanosine
  modified_base 12: mod_base = OTHER; note = 2'-fluoro uridine
  modified_base 13: mod_base = OTHER; note = 2'O-methyl cytidine
  modified_base 14: mod_base = OTHER; note = 2'-fluoro uridine
  modified_base 15: mod_base = OTHER; note = 2'O-methyl uridine
  modified_base 16: mod_base = OTHER; note = 2'-fluoro uridine
  modified_base 17: mod_base = OTHER; note = 2'O-methyl guanosine
  modified_base 18: mod_base = OTHER; note = 2'-fluoro guanosine
  modified_base 19: mod_base = OTHER; note = 2'O-methyl adenosine phosphorothioate
  modified_base 20: mod_base = OTHER; note = 2'O-methyl uridine phosphorothioate
  modified_base 21: mod_base = OTHER; note = 2'O-methyl uridine
ccacgacttcgtctttggatt

SEQ ID NO: 1595 - RNA, 21 nt, synthetic construct
  source 1..21: mol_type = other RNA
  modified_base 1: mod_base = OTHER; note = 2'O-methyl uridine phosphorothioate
  modified_base 2: mod_base = OTHER; note = 2'-fluoro cytidine phosphorothioate
  modified_base 3: mod_base = OTHER; note = 2'O-methyl cytidine
  modified_base 4: mod_base = OTHER; note = 2'-fluoro adenosine
  modified_base 5: mod_base = OTHER; note = 2'O-methyl cytidine
  modified_base 6: mod_base = OTHER; note = 2'-fluoro guanosine
  modified_base 7: mod_base = OTHER; note = 2'O-methyl adenosine
  modified_base 8: mod_base = OTHER; note = 2'-fluoro cytidine
  modified_base 9: mod_base = OTHER; note = 2'O-methyl uridine
  modified_base 10: mod_base = OTHER; note = 2'-fluoro uridine
  modified_base 11: mod_base = OTHER; note = 2'O-methyl cytidine
  modified_base 12: mod_base = OTHER; note = 2'-fluoro guanosine
  modified_base 13: mod_base = OTHER; note = 2'O-methyl uridine
  modified_base 14: mod_base = OTHER; note = 2'-fluoro cytidine
  modified_base 15: mod_base = OTHER; note = 2'O-methyl uridine
  modified_base 16: mod_base = OTHER; note = 2'-fluoro uridine
  modified_base 17: mod_base = OTHER; note = 2'O-methyl uridine
  modified_base 18: mod_base = OTHER; note = 2'-fluoro guanosine
  modified_base 19: mod_base = OTHER; note = 2'O-methyl guanosine phosphorothioate
  modified_base 20: mod_base = OTHER; note = 2'O-methyl uridine phosphorothioate
  modified_base 21: mod_base = OTHER; note = 2'O-methyl uridine
tccacgacttcgtctttggtt

SEQ ID NO: 1596 - RNA, 21 nt, synthetic construct
  source 1..21: mol_type = other RNA
  modified_base 1: mod_base = OTHER; note = 2'O-methyl adenosine phosphorothioate
  modified_base 2: mod_base = OTHER; note = 2'-fluoro uridine phosphorothioate
  modified_base 3: mod_base = OTHER; note = 2'O-methyl cytidine
  modified_base 4: mod_base = OTHER; note = 2'-fluoro cytidine
  modified_base 5: mod_base = OTHER; note = 2'O-methyl adenosine
  modified_base 6: mod_base = OTHER; note = 2'-fluoro cytidine
  modified_base 7: mod_base = OTHER; note = 2'O-methyl guanosine
  modified_base 8: mod_base = OTHER; note = 2'-fluoro adenosine
  modified_base 9: mod_base = OTHER; note = 2'O-methyl cytidine
  modified_base 10: mod_base = OTHER; note = 2'-fluoro uridine
  modified_base 11: mod_base = OTHER; note = 2'O-methyl uridine
  modified_base 12: mod_base = OTHER; note = 2'-fluoro cytidine
  modified_base 13: mod_base = OTHER; note = 2'O-methyl guanosine
  modified_base 14: mod_base = OTHER; note = 2'-fluoro uridine
  modified_base 15: mod_base = OTHER; note = 2'O-methyl cytidine
  modified_base 16: mod_base = OTHER; note = 2'-fluoro uridine
  modified_base 17: mod_base = OTHER; note = 2'O-methyl uridine
  modified_base 18: mod_base = OTHER; note = 2'-fluoro uridine
  modified_base 19: mod_base = OTHER; note = 2'O-methyl guanosine phosphorothioate
  modified_base 20: mod_base = OTHER; note = 2'O-methyl uridine phosphorothioate
  modified_base 21: mod_base = OTHER; note = 2'O-methyl uridine
atccacgacttcgtctttgtt

SEQ ID NO: 1597 - RNA, 21 nt, synthetic construct
  source 1..21: mol_type = other RNA
  modified_base 1: mod_base = OTHER; note = 2'O-methyl guanosine phosphorothioate
  modified_base 2: mod_base = OTHER; note = 2'-fluoro cytidine phosphorothioate
  modified_base 3: mod_base = OTHER; note = 2'O-methyl adenosine
  modified_base 4: mod_base = OTHER; note = 2'-fluoro uridine
  modified_base 5: mod_base = OTHER; note = 2'O-methyl cytidine
  modified_base 6: mod_base = OTHER; note = 2'-fluoro cytidine
  modified_base 7: mod_base = OTHER; note = 2'O-methyl adenosine
  modified_base 8: mod_base = OTHER; note = 2'-fluoro cytidine
  modified_base 9: mod_base = OTHER; note = 2'O-methyl guanosine
  modified_base 10: mod_base = OTHER; note = 2'-fluoro adenosine
  modified_base 11: mod_base = OTHER; note = 2'O-methyl cytidine
  modified_base 12: mod_base = OTHER; note = 2'-fluoro uridine
  modified_base 13: mod_base = OTHER; note = 2'O-methyl uridine
  modified_base 14: mod_base = OTHER; note = 2'-fluoro cytidine
  modified_base 15: mod_base = OTHER; note = 2'O-methyl guanosine
  modified_base 16: mod_base = OTHER; note = 2'-fluoro uridine
  modified_base 17: mod_base = OTHER; note = 2'O-methyl cytidine
  modified_base 18: mod_base = OTHER; note = 2'-fluoro uridine
  modified_base 19: mod_base = OTHER; note = 2'O-methyl uridine phosphorothioate
  modified_base 20: mod_base = OTHER; note = 2'O-methyl uridine phosphorothioate
  modified_base 21: mod_base = OTHER; note = 2'O-methyl uridine
gcatccacgacttcgtctttt

SEQ ID NO: 1598 - RNA, 21 nt, synthetic construct
  source 1..21: mol_type = other RNA
  modified_base 1: mod_base = OTHER; note = 2'O-methyl guanosine phosphorothioate
  modified_base 2: mod_base = OTHER; note = 2'-fluoro guanosine phosphorothioate
  modified_base 3: mod_base = OTHER; note = 2'O-methyl cytidine
  modified_base 4: mod_base = OTHER; note = 2'-fluoro adenosine
  modified_base 5: mod_base = OTHER; note = 2'O-methyl uridine
  modified_base 6: mod_base = OTHER; note = 2'-fluoro cytidine
  modified_base 7: mod_base = OTHER; note = 2'O-methyl cytidine
  modified_base 8: mod_base = OTHER; note = 2'-fluoro adenosine
  modified_base 9: mod_base = OTHER; note = 2'O-methyl cytidine
  modified_base 10: mod_base = OTHER; note = 2'-fluoro guanosine
  modified_base 11: mod_base = OTHER; note = 2'O-methyl adenosine
  modified_base 12: mod_base = OTHER; note = 2'-fluoro cytidine
  modified_base 13: mod_base = OTHER; note = 2'O-methyl uridine
  modified_base 14: mod_base = OTHER; note = 2'-fluoro uridine
  modified_base 15: mod_base = OTHER; note = 2'O-methyl cytidine
  modified_base 16: mod_base = OTHER; note = 2'-fluoro guanosine
  modified_base 17: mod_base = OTHER; note = 2'O-methyl uridine
  modified_base 18: mod_base = OTHER; note = 2'-fluoro cytidine
  modified_base 19: mod_base = OTHER; note = 2'O-methyl uridine phosphorothioate
  modified_base 20: mod_base = OTHER; note = 2'O-methyl uridine phosphorothioate
  modified_base 21: mod_base = OTHER; note = 2'O-methyl uridine
ggcatccacgacttcgtcttt

SEQ ID NO: 1599 - RNA, 21 nt, synthetic construct
  source 1..21: mol_type = other RNA
  modified_base 1: mod_base = OTHER; note = 2'O-methyl adenosine phosphorothioate
  modified_base 2: mod_base = OTHER; note = 2'-fluoro guanosine phosphorothioate
  modified_base 3: mod_base = OTHER; note = 2'O-methyl guanosine
  modified_base 4: mod_base = OTHER; note = 2'-fluoro cytidine
  modified_base 5: mod_base = OTHER; note = 2'O-methyl adenosine
  modified_base 6: mod_base = OTHER; note = 2'-fluoro uridine
  modified_base 7: mod_base = OTHER; note = 2'O-methyl cytidine
  modified_base 8: mod_base = OTHER; note = 2'-fluoro cytidine
  modified_base 9: mod_base = OTHER; note = 2'O-methyl adenosine
  modified_base 10: mod_base = OTHER; note = 2'-fluoro cytidine
  modified_base 11: mod_base = OTHER; note = 2'O-methyl guanosine
  modified_base 12: mod_base = OTHER; note = 2'-fluoro adenosine
  modified_base 13: mod_base = OTHER; note = 2'O-methyl cytidine
  modified_base 14: mod_base = OTHER; note = 2'-fluoro uridine
  modified_base 15: mod_base = OTHER; note = 2'O-methyl uridine
  modified_base 16: mod_base = OTHER; note = 2'-fluoro cytidine
  modified_base 17: mod_base = OTHER; note = 2'O-methyl guanosine
  modified_base 18: mod_base = OTHER; note = 2'-fluoro uridine
  modified_base 19: mod_base = OTHER; note = 2'O-methyl cytidine phosphorothioate
  modified_base 20: mod_base = OTHER; note = 2'O-methyl uridine phosphorothioate
  modified_base 21: mod_base = OTHER; note = 2'O-methyl uridine
aggcatccacgacttcgtctt

SEQ ID NO: 1600 - RNA, 21 nt, synthetic construct
  source 1..21: mol_type = other RNA
  modified_base 1: mod_base = OTHER; note = 2'O-methyl adenosine phosphorothioate
  modified_base 2: mod_base = OTHER; note = 2'-fluoro adenosine phosphorothioate
  modified_base 3: mod_base = OTHER; note = 2'O-methyl guanosine
  modified_base 4: mod_base = OTHER; note = 2'-fluoro guanosine
  modified_base 5: mod_base = OTHER; note = 2'O-methyl cytidine
  modified_base 6: mod_base = OTHER; note = 2'-fluoro adenosine
  modified_base 7: mod_base = OTHER; note = 2'O-methyl uridine
  modified_base 8: mod_base = OTHER; note = 2'-fluoro cytidine
  modified_base 9: mod_base = OTHER; note = 2'O-methyl cytidine
  modified_base 10: mod_base = OTHER; note = 2'-fluoro adenosine
  modified_base 11: mod_base = OTHER; note = 2'O-methyl cytidine
  modified_base 12: mod_base = OTHER; note = 2'-fluoro guanosine
  modified_base 13: mod_base = OTHER; note = 2'O-methyl adenosine
  modified_base 14: mod_base = OTHER; note = 2'-fluoro cytidine
  modified_base 15: mod_base = OTHER; note = 2'O-methyl uridine
  modified_base 16: mod_base = OTHER; note = 2'-fluoro uridine
  modified_base 17: mod_base = OTHER; note = 2'O-methyl cytidine
  modified_base 18: mod_base = OTHER; note = 2'-fluoro guanosine
  modified_base 19: mod_base = OTHER; note = 2'O-methyl uridine phosphorothioate
  modified_base 20: mod_base = OTHER; note = 2'O-methyl uridine phosphorothioate
  modified_base 21: mod_base = OTHER; note = 2'O-methyl uridine
aaggcatccacgacttcgttt

SEQ ID NO: 1601 - RNA, 21 nt, synthetic construct
  source 1..21: mol_type = other RNA
  modified_base 1: mod_base = OTHER; note = 2'O-methyl cytidine phosphorothioate
  modified_base 2: mod_base = OTHER; note = 2'-fluoro cytidine phosphorothioate
  modified_base 3: mod_base = OTHER; note = 2'O-methyl adenosine
  modified_base 4: mod_base = OTHER; note = 2'-fluoro adenosine
  modified_base 5: mod_base = OTHER; note = 2'O-methyl guanosine
  modified_base 6: mod_base = OTHER; note = 2'-fluoro guanosine
  modified_base 7: mod_base = OTHER; note = 2'O-methyl cytidine
  modified_base 8: mod_base = OTHER; note = 2'-fluoro adenosine
  modified_base 9: mod_base = OTHER; note = 2'O-methyl uridine
  modified_base 10: mod_base = OTHER; note = 2'-fluoro cytidine
  modified_base 11: mod_base = OTHER; note = 2'O-methyl cytidine
  modified_base 12: mod_base = OTHER; note = 2'-fluoro adenosine
  modified_base 13: mod_base = OTHER; note = 2'O-methyl cytidine
  modified_base 14: mod_base = OTHER; note = 2'-fluoro guanosine
  modified_base 15: mod_base = OTHER; note = 2'O-methyl adenosine
  modified_base 16: mod_base = OTHER; note = 2'-fluoro cytidine
  modified_base 17: mod_base = OTHER; note = 2'O-methyl uridine
  modified_base 18: mod_base = OTHER; note = 2'-fluoro uridine
  modified_base 19: mod_base = OTHER; note = 2'O-methyl cytidine phosphorothioate
  modified_base 20: mod_base = OTHER; note = 2'O-methyl uridine phosphorothioate
  modified_base 21: mod_base = OTHER; note = 2'O-methyl uridine
ccaaggcatccacgacttctt

SEQ ID NO: 1602 - RNA, 21 nt, synthetic construct
  source 1..21: mol_type = other RNA
  modified_base 1: mod_base = OTHER; note = 2'O-methyl adenosine phosphorothioate
  modified_base 2: mod_base = OTHER; note = 2'-fluoro cytidine phosphorothioate
  modified_base 3: mod_base = OTHER; note = 2'O-methyl cytidine
  modified_base 4: mod_base = OTHER; note = 2'-fluoro adenosine
  modified_base 5: mod_base = OTHER; note = 2'O-methyl adenosine
  modified_base 6: mod_base = OTHER; note = 2'-fluoro guanosine
  modified_base 7: mod_base = OTHER; note = 2'O-methyl guanosine
  modified_base 8: mod_base = OTHER; note = 2'-fluoro cytidine
  modified_base 9: mod_base = OTHER; note = 2'O-methyl adenosine
  modified_base 10: mod_base = OTHER; note = 2'-fluoro uridine
  modified_base 11: mod_base = OTHER; note = 2'O-methyl cytidine
  modified_base 12: mod_base = OTHER; note = 2'-fluoro cytidine
  modified_base 13: mod_base = OTHER; note = 2'O-methyl adenosine
  modified_base 14: mod_base = OTHER; note = 2'-fluoro cytidine
  modified_base 15: mod_base = OTHER; note = 2'O-methyl guanosine
  modified_base 16: mod_base = OTHER; note = 2'-fluoro adenosine
  modified_base 17: mod_base = OTHER; note = 2'O-methyl cytidine
  modified_base 18: mod_base = OTHER; note = 2'-fluoro uridine
  modified_base 19: mod_base = OTHER; note = 2'O-methyl uridine phosphorothioate
  modified_base 20: mod_base = OTHER; note = 2'O-methyl uridine phosphorothioate
  modified_base 21: mod_base = OTHER; note = 2'O-methyl uridine
accaaggcatccacgactttt

SEQ ID NO: 1603 - RNA, 21 nt, synthetic construct
  source 1..21: mol_type = other RNA
  modified_base 1: mod_base = OTHER; note = 2'O-methyl adenosine phosphorothioate
  modified_base 2: mod_base = OTHER; note = 2'-fluoro uridine phosphorothioate
  modified_base 3: mod_base = OTHER; note = 2'O-methyl adenosine
  modified_base 4: mod_base = OTHER; note = 2'-fluoro cytidine
  modified_base 5: mod_base = OTHER; note = 2'O-methyl cytidine
  modified_base 6: mod_base = OTHER; note = 2'-fluoro adenosine
  modified_base 7: mod_base = OTHER; note = 2'O-methyl adenosine
  modified_base 8: mod_base = OTHER; note = 2'-fluoro guanosine
  modified_base 9: mod_base = OTHER; note = 2'O-methyl guanosine
  modified_base 10: mod_base = OTHER; note = 2'-fluoro cytidine
  modified_base 11: mod_base = OTHER; note = 2'O-methyl adenosine
  modified_base 12: mod_base = OTHER; note = 2'-fluoro uridine
  modified_base 13: mod_base = OTHER; note = 2'O-methyl cytidine
  modified_base 14: mod_base = OTHER; note = 2'-fluoro cytidine
  modified_base 15: mod_base = OTHER; note = 2'O-methyl adenosine
  modified_base 16: mod_base = OTHER; note = 2'-fluoro cytidine
  modified_base 17: mod_base = OTHER; note = 2'O-methyl guanosine
  modified_base 18: mod_base = OTHER; note = 2'-fluoro adenosine
  modified_base 19: mod_base = OTHER; note = 2'O-methyl cytidine phosphorothioate
  modified_base 20: mod_base = OTHER; note = 2'O-methyl uridine phosphorothioate
  modified_base 21: mod_base = OTHER; note = 2'O-methyl uridine
ataccaaggcatccacgactt

SEQ ID NO: 1604 - RNA, 21 nt, synthetic construct
  source 1..21: mol_type = other RNA
  modified_base 1: mod_base = OTHER; note = 2'O-methyl cytidine phosphorothioate
  modified_base 2: mod_base = OTHER; note = 2'-fluoro adenosine phosphorothioate
  modified_base 3: mod_base = OTHER; note = 2'O-methyl uridine
  modified_base 4: mod_base = OTHER; note = 2'-fluoro adenosine
  modified_base 5: mod_base = OTHER; note = 2'O-methyl cytidine
  modified_base 6: mod_base = OTHER; note = 2'-fluoro cytidine
  modified_base 7: mod_base = OTHER; note = 2'O-methyl adenosine
  modified_base 8: mod_base = OTHER; note = 2'-fluoro adenosine
  modified_base 9: mod_base = OTHER; note = 2'O-methyl guanosine
  modified_base 10: mod_base = OTHER; note = 2'-fluoro guanosine
  modified_base 11: mod_base = OTHER; note = 2'O-methyl cytidine
  modified_base 12: mod_base = OTHER; note = 2'-fluoro adenosine
  modified_base 13: mod_base = OTHER; note = 2'O-methyl uridine
  modified_base 14: mod_base = OTHER; note = 2'-fluoro cytidine
  modified_base 15: mod_base = OTHER; note = 2'O-methyl cytidine
  modified_base 16: mod_base = OTHER; note = 2'-fluoro adenosine
  modified_base 17: mod_base = OTHER; note = 2'O-methyl cytidine
  modified_base 18: mod_base = OTHER; note = 2'-fluoro guanosine
  modified_base 19: mod_base = OTHER; note = 2'O-methyl adenosine phosphorothioate
  modified_base 20: mod_base = OTHER; note = 2'O-methyl uridine phosphorothioate
  modified_base 21: mod_base = OTHER; note = 2'O-methyl uridine
cataccaaggcatccacgatt

SEQ ID NO: 1605 - RNA, 21 nt, synthetic construct
  source 1..21: mol_type = other RNA
  modified_base 1: mod_base = OTHER; note = 2'O-methyl adenosine phosphorothioate
  modified_base 2: mod_base = OTHER; note = 2'-fluoro adenosine phosphorothioate
  modified_base 3: mod_base = OTHER; note = 2'O-methyl cytidine
  modified_base 4: mod_base = OTHER; note = 2'-fluoro adenosine
  modified_base 5: mod_base = OTHER; note = 2'O-methyl uridine
  modified_base 6: mod_base = OTHER; note = 2'-fluoro adenosine
  modified_base 7: mod_base = OTHER; note = 2'O-methyl cytidine
  modified_base 8: mod_base = OTHER; note = 2'-fluoro cytidine
  modified_base 9: mod_base = OTHER; note = 2'O-methyl adenosine
  modified_base 10: mod_base = OTHER; note = 2'-fluoro adenosine
  modified_base 11: mod_base = OTHER; note = 2'O-methyl guanosine
  modified_base 12: mod_base = OTHER; note = 2'-fluoro guanosine
  modified_base 13: mod_base = OTHER; note = 2'O-methyl cytidine
  modified_base 14: mod_base = OTHER; note = 2'-fluoro adenosine
  modified_base 15: mod_base = OTHER; note = 2'O-methyl uridine
  modified_base 16: mod_base = OTHER; note = 2'-fluoro cytidine
  modified_base 17: mod_base = OTHER; note = 2'O-methyl cytidine
  modified_base 18: mod_base = OTHER; note = 2'-fluoro adenosine
  modified_base 19: mod_base = OTHER; note = 2'O-methyl cytidine phosphorothioate
  modified_base 20: mod_base = OTHER; note = 2'O-methyl uridine phosphorothioate
  modified_base 21: mod_base = OTHER; note = 2'O-methyl uridine
aacataccaaggcatccactt

SEQ ID NO: 1606 - RNA, 21 nt, synthetic construct
  source 1..21: mol_type = other RNA
  modified_base 1: mod_base = OTHER; note = 2'O-methyl guanosine phosphorothioate
  modified_base 2: mod_base = OTHER; note = 2'-fluoro adenosine phosphorothioate
  modified_base 3: mod_base = OTHER; note = 2'O-methyl adenosine
  modified_base 4: mod_base = OTHER; note = 2'-fluoro cytidine
  modified_base 5: mod_base = OTHER; note = 2'O-methyl adenosine
  modified_base 6: mod_base = OTHER; note = 2'-fluoro uridine
  modified_base 7: mod_base = OTHER; note = 2'O-methyl adenosine
  modified_base 8: mod_base = OTHER; note = 2'-fluoro cytidine
  modified_base 9: mod_base = OTHER; note = 2'O-methyl cytidine
  modified_base 10: mod_base = OTHER; note = 2'-fluoro adenosine
  modified_base 11: mod_base = OTHER; note = 2'O-methyl adenosine
  modified_base 12: mod_base = OTHER; note = 2'-fluoro guanosine
  modified_base 13: mod_base = OTHER; note = 2'O-methyl guanosine
  modified_base 14: mod_base = OTHER; note = 2'-fluoro cytidine
  modified_base 15: mod_base = OTHER; note = 2'O-methyl adenosine
  modified_base 16: mod_base = OTHER; note = 2'-fluoro uridine
  modified_base 17: mod_base = OTHER; note = 2'O-methyl cytidine
  modified_base 18: mod_base = OTHER; note = 2'-fluoro cytidine
  modified_base 19: mod_base = OTHER; note = 2'O-methyl adenosine phosphorothioate
  modified_base 20: mod_base = OTHER; note = 2'O-methyl uridine phosphorothioate
  modified_base 21: mod_base = OTHER; note = 2'O-methyl uridine
gaacataccaaggcatccatt

SEQ ID NO: 1607 - RNA, 21 nt, synthetic construct
  source 1..21: mol_type = other RNA
  modified_base 1: mod_base = OTHER; note = 2'O-methyl guanosine phosphorothioate
  modified_base 2: mod_base = OTHER; note = 2'-fluoro guanosine phosphorothioate
  modified_base 3: mod_base = OTHER; note = 2'O-methyl adenosine
  modified_base 4: mod_base = OTHER; note = 2'-fluoro adenosine
  modified_base 5: mod_base = OTHER; note = 2'O-methyl cytidine
  modified_base 6: mod_base = OTHER; note = 2'-fluoro adenosine
  modified_base 7: mod_base = OTHER; note = 2'O-methyl uridine
  modified_base 8: mod_base = OTHER; note = 2'-fluoro adenosine
  modified_base 9: mod_base = OTHER; note = 2'O-methyl cytidine
  modified_base 10: mod_base = OTHER; note = 2'-fluoro cytidine
  modified_base 11: mod_base = OTHER; note = 2'O-methyl adenosine
  modified_base 12: mod_base = OTHER; note = 2'-fluoro adenosine
  modified_base 13: mod_base = OTHER; note = 2'O-methyl guanosine
  modified_base 14: mod_base = OTHER; note = 2'-fluoro guanosine
  modified_base 15: mod_base = OTHER; note = 2'O-methyl cytidine
  modified_base 16: mod_base = OTHER; note = 2'-fluoro adenosine
  modified_base 17: mod_base = OTHER; note = 2'O-methyl uridine
  modified_base 18: mod_base = OTHER; note = 2'-fluoro cytidine
  modified_base 19: mod_base = OTHER; note = 2'O-methyl cytidine phosphorothioate
  modified_base 20: mod_base = OTHER; note = 2'O-methyl uridine phosphorothioate
  modified_base 21: mod_base = OTHER; note = 2'O-methyl uridine
ggaacataccaaggcatcctt

SEQ ID NO: 1608 - RNA, 21 nt, synthetic construct
  source 1..21: mol_type = other RNA
  modified_base 1: mod_base = OTHER; note = 2'O-methyl cytidine phosphorothioate
  modified_base 2: mod_base = OTHER; note = 2'-fluoro adenosine phosphorothioate
  modified_base 3: mod_base = OTHER; note = 2'O-methyl guanosine
  modified_base 4: mod_base = OTHER; note = 2'-fluoro guanosine
  modified_base 5: mod_base = OTHER; note = 2'O-methyl adenosine
  modified_base 6: mod_base = OTHER; note = 2'-fluoro adenosine
  modified_base 7: mod_base = OTHER; note = 2'O-methyl cytidine
  modified_base 8: mod_base = OTHER; note = 2'-fluoro adenosine
  modified_base 9: mod_base = OTHER; note = 2'O-methyl uridine
  modified_base 10: mod_base = OTHER; note = 2'-fluoro adenosine
  modified_base 11: mod_base = OTHER; note = 2'O-methyl cytidine
  modified_base 12: mod_base = OTHER; note = 2'-fluoro cytidine
  modified_base 13: mod_base = OTHER; note = 2'O-methyl adenosine
  modified_base 14: mod_base = OTHER; note = 2'-fluoro adenosine
  modified_base 15: mod_base = OTHER; note = 2'O-methyl guanosine
  modified_base 16: mod_base = OTHER; note = 2'-fluoro guanosine
  modified_base 17: mod_base = OTHER; note = 2'O-methyl cytidine
  modified_base 18: mod_base = OTHER; note = 2'-fluoro adenosine
  modified_base 19: mod_base = OTHER; note = 2'O-methyl uridine phosphorothioate
  modified_base 20: mod_base = OTHER; note = 2'O-methyl uridine phosphorothioate
  modified_base 21: mod_base = OTHER; note = 2'O-methyl uridine
caggaacataccaaggcattt

SEQ ID NO: 1609 - RNA, 21 nt, synthetic construct
  source 1..21: mol_type = other RNA
  modified_base 1: mod_base = OTHER; note = 2'O-methyl adenosine phosphorothioate
  modified_base 2: mod_base = OTHER; note = 2'-fluoro guanosine phosphorothioate
  modified_base 3: mod_base = OTHER; note = 2'O-methyl cytidine
  modified_base 4: mod_base = OTHER; note = 2'-fluoro adenosine
  modified_base 5: mod_base = OTHER; note = 2'O-methyl guanosine
  modified_base 6: mod_base = OTHER; note = 2'-fluoro guanosine
  modified_base 7: mod_base = OTHER; note = 2'O-methyl adenosine
  modified_base 8: mod_base = OTHER; note = 2'-fluoro adenosine
  modified_base 9: mod_base = OTHER; note = 2'O-methyl cytidine
  modified_base 10: mod_base = OTHER; note = 2'-fluoro adenosine
  modified_base 11: mod_base = OTHER; note = 2'O-methyl uridine
  modified_base 12: mod_base = OTHER; note = 2'-fluoro adenosine
  modified_base 13: mod_base = OTHER; note = 2'O-methyl cytidine
  modified_base 14: mod_base = OTHER; note = 2'-fluoro cytidine
  modified_base 15: mod_base = OTHER; note = 2'O-methyl adenosine
  modified_base 16: mod_base = OTHER; note = 2'-fluoro adenosine
  modified_base 17: mod_base = OTHER; note = 2'O-methyl guanosine
  modified_base 18: mod_base = OTHER; note = 2'-fluoro guanosine
  modified_base 19: mod_base = OTHER; note = 2'O-methyl cytidine phosphorothioate
  modified_base 20: mod_base = OTHER; note = 2'O-methyl uridine phosphorothioate
  modified_base 21: mod_base = OTHER; note = 2'O-methyl uridine
agcaggaacataccaaggctt

SEQ ID NO: 1610 - RNA, 21 nt, synthetic construct
  source 1..21: mol_type = other RNA
  modified_base 1: mod_base = OTHER; note = 2'O-methyl guanosine phosphorothioate
  modified_base 2: mod_base = OTHER; note = 2'-fluoro guanosine phosphorothioate
  modified_base 3: mod_base = OTHER; note = 2'O-methyl guanosine
  modified_base 4: mod_base = OTHER; note = 2'-fluoro cytidine
  modified_base 5: mod_base = OTHER; note = 2'O-methyl adenosine
  modified_base 6: mod_base = OTHER; note = 2'-fluoro uridine
  modified_base 7: mod_base = OTHER; note = 2'O-methyl guanosine
  modified_base 8: mod_base = OTHER; note = 2'-fluoro adenosine
  modified_base 9: mod_base = OTHER; note = 2'O-methyl adenosine
  modified_base 10: mod_base = OTHER; note = 2'-fluoro guanosine
  modified_base 11: mod_base = OTHER; note = 2'O-methyl cytidine
  modified_base 12: mod_base = OTHER; note = 2'-fluoro adenosine
  modified_base 13: mod_base = OTHER; note = 2'O-methyl guanosine
  modified_base 14: mod_base = OTHER; note = 2'-fluoro guanosine
  modified_base 15: mod_base = OTHER; note = 2'O-methyl adenosine
  modified_base 16: mod_base = OTHER; note = 2'-fluoro adenosine
  modified_base 17: mod_base = OTHER; note = 2'O-methyl cytidine
  modified_base 18: mod_base = OTHER; note = 2'-fluoro adenosine
  modified_base 19: mod_base = OTHER; note = 2'O-methyl uridine phosphorothioate
  modified_base 20: mod_base = OTHER; note = 2'O-methyl uridine phosphorothioate
  modified_base 21: mod_base = OTHER; note = 2'O-methyl uridine
gggcatgaagcaggaacattt

SEQ ID NO: 1611 - RNA, 21 nt, synthetic construct
  source 1..21: mol_type = other RNA
  modified_base 1: mod_base = OTHER; note = 2'O-methyl guanosine phosphorothioate
  modified_base 2: mod_base = OTHER; note = 2'-fluoro adenosine phosphorothioate
  modified_base 3: mod_base = OTHER; note = 2'O-methyl adenosine
  modified_base 4: mod_base = OTHER; note = 2'-fluoro guanosine
  modified_base 5: mod_base = OTHER; note = 2'O-methyl guanosine
  modified_base 6: mod_base = OTHER; note = 2'-fluoro guanosine
  modified_base 7: mod_base = OTHER; note = 2'O-methyl cytidine
  modified_base 8: mod_base = OTHER; note = 2'-fluoro adenosine
  modified_base 9: mod_base = OTHER; note = 2'O-methyl uridine
  modified_base 10: mod_base = OTHER; note = 2'-fluoro guanosine
  modified_base 11: mod_base = OTHER; note = 2'O-methyl adenosine
  modified_base 12: mod_base = OTHER; note = 2'-fluoro adenosine
  modified_base 13: mod_base = OTHER; note = 2'O-methyl guanosine
  modified_base 14: mod_base = OTHER; note = 2'-fluoro cytidine
  modified_base 15: mod_base = OTHER; note = 2'O-methyl adenosine
  modified_base 16: mod_base = OTHER; note = 2'-fluoro guanosine
  modified_base 17: mod_base = OTHER; note = 2'O-methyl guanosine
  modified_base 18: mod_base = OTHER; note = 2'-fluoro adenosine
  modified_base 19: mod_base = OTHER; note = 2'O-methyl adenosine phosphorothioate
  modified_base 20: mod_base = OTHER; note = 2'O-methyl uridine phosphorothioate
  modified_base 21: mod_base = OTHER; note = 2'O-methyl uridine
gaagggcatgaagcaggaatt

SEQ ID NO: 1612 - RNA, 21 nt, synthetic construct
  source 1..21: mol_type = other RNA
  modified_base 1: mod_base = OTHER; note = 2'O-methyl adenosine phosphorothioate
  modified_base 2: mod_base = OTHER; note = 2'-fluoro guanosine phosphorothioate
  modified_base 3: mod_base = OTHER; note = 2'O-methyl adenosine
  modified_base 4: mod_base = OTHER; note = 2'-fluoro adenosine
  modified_base 5: mod_base = OTHER; note = 2'O-methyl guanosine
  modified_base 6: mod_base = OTHER; note = 2'-fluoro guanosine
  modified_base 7: mod_base = OTHER; note = 2'O-methyl guanosine
  modified_base 8: mod_base = OTHER; note = 2'-fluoro cytidine
  modified_base 9: mod_base = OTHER; note = 2'O-methyl adenosine
  modified_base 10: mod_base = OTHER; note = 2'-fluoro uridine
  modified_base 11: mod_base = OTHER; note = 2'O-methyl guanosine
  modified_base 12: mod_base = OTHER; note = 2'-fluoro adenosine
  modified_base 13: mod_base = OTHER; note = 2'O-methyl adenosine
  modified_base 14: mod_base = OTHER; note = 2'-fluoro guanosine
  modified_base 15: mod_base = OTHER; note = 2'O-methyl cytidine
  modified_base 16: mod_base = OTHER; note = 2'-fluoro adenosine
  modified_base 17: mod_base = OTHER; note = 2'O-methyl guanosine
  modified_base 18: mod_base = OTHER; note = 2'-fluoro guanosine
  modified_base 19: mod_base = OTHER; note = 2'O-methyl adenosine phosphorothioate
  modified_base 20: mod_base = OTHER; note = 2'O-methyl uridine phosphorothioate
  modified_base 21: mod_base = OTHER; note = 2'O-methyl uridine
agaagggcatgaagcaggatt

SEQ ID NO: 1613 - RNA, 21 nt, synthetic construct
  source 1..21: mol_type = other RNA
  modified_base 1: mod_base = OTHER; note = 2'O-methyl guanosine phosphorothioate
  modified_base 2: mod_base = OTHER; note = 2'-fluoro guanosine phosphorothioate
  modified_base 3: mod_base = OTHER; note = 2'O-methyl adenosine
  modified_base 4: mod_base = OTHER; note = 2'-fluoro adenosine
  modified_base 5: mod_base = OTHER; note = 2'O-methyl guanosine
  modified_base 6: mod_base = OTHER; note = 2'-fluoro guanosine
  modified_base 7: mod_base = OTHER; note = 2'O-methyl adenosine
  modified_base 8: mod_base = OTHER; note = 2'-fluoro guanosine
  modified_base 9: mod_base = OTHER; note = 2'O-methyl guanosine
  modified_base 10: mod_base = OTHER; note = 2'-fluoro guanosine
  modified_base 11: mod_base = OTHER; note = 2'O-methyl adenosine
  modified_base 12: mod_base = OTHER; note = 2'-fluoro uridine
  modified_base 13: mod_base = OTHER; note = 2'O-methyl adenosine
  modified_base 14: mod_base = OTHER; note = 2'-fluoro adenosine
  modified_base 15: mod_base = OTHER; note = 2'O-methyl guanosine
  modified_base 16: mod_base = OTHER; note = 2'-fluoro guanosine
  modified_base 17: mod_base = OTHER; note = 2'O-methyl cytidine
  modified_base 18: mod_base = OTHER; note = 2'-fluoro cytidine
  modified_base 19: mod_base = OTHER; note = 2'O-methyl adenosine phosphorothioate
  modified_base 20: mod_base = OTHER; note = 2'O-methyl uridine phosphorothioate
  modified_base 21: mod_base = OTHER; note = 2'O-methyl uridine
ggaaggagggataaggccatt

SEQ ID NO: 1614 - RNA, 21 nt, synthetic construct
  source 1..21: mol_type = other RNA
  modified_base 1: mod_base = OTHER; note = 2'O-methyl cytidine phosphorothioate
  modified_base 2: mod_base = OTHER; note = 2'-fluoro uridine phosphorothioate
  modified_base 3: mod_base = OTHER; note = 2'O-methyl guanosine
  modified_base 4: mod_base = OTHER; note = 2'-fluoro adenosine
  modified_base 5: mod_base = OTHER; note = 2'O-methyl adenosine
  modified_base 6: mod_base = OTHER; note = 2'-fluoro guanosine
  modified_base 7: mod_base = OTHER; note = 2'O-methyl guanosine
  modified_base 8: mod_base = OTHER; note = 2'-fluoro adenosine
  modified_base 9: mod_base = OTHER; note = 2'O-methyl adenosine
  modified_base 10: mod_base = OTHER; note = 2'-fluoro guanosine
  modified_base 11: mod_base = OTHER; note = 2'O-methyl guanosine
  modified_base 12: mod_base = OTHER; note = 2'-fluoro adenosine
  modified_base 13: mod_base = OTHER; note = 2'O-methyl guanosine
  modified_base 14: mod_base = OTHER; note = 2'-fluoro guanosine
  modified_base 15: mod_base = OTHER; note = 2'O-methyl guanosine
  modified_base 16: mod_base = OTHER; note = 2'-fluoro adenosine
  modified_base 17: mod_base = OTHER; note = 2'O-methyl uridine
  modified_base 18: mod_base = OTHER; note = 2'-fluoro adenosine
  modified_base 19: mod_base = OTHER; note = 2'O-methyl adenosine phosphorothioate
  modified_base 20: mod_base = OTHER; note = 2'O-methyl uridine phosphorothioate
  modified_base 21: mod_base = OTHER; note = 2'O-methyl uridine
ctgaaggaaggagggataatt

SEQ ID NO: 1615 - RNA, 21 nt, synthetic construct
  source 1..21: mol_type = other RNA
  modified_base 1: mod_base = OTHER; note = 2'O-methyl uridine phosphorothioate
  modified_base 2: mod_base = OTHER; note = 2'-fluoro cytidine phosphorothioate
  modified_base 3: mod_base = OTHER; note = 2'O-methyl uridine
  modified_base 4: mod_base = OTHER; note = 2'-fluoro guanosine
  modified_base 5: mod_base = OTHER; note = 2'O-methyl adenosine
  modified_base 6: mod_base = OTHER; note = 2'-fluoro adenosine
  modified_base 7: mod_base = OTHER; note = 2'O-methyl guanosine
  modified_base 8: mod_base = OTHER; note = 2'-fluoro guanosine
  modified_base 9: mod_base = OTHER; note = 2'O-methyl adenosine
  modified_base 10: mod_base = OTHER; note = 2'-fluoro adenosine
  modified_base 11: mod_base = OTHER; note = 2'O-methyl guanosine
  modified_base 12: mod_base = OTHER; note = 2'-fluoro guanosine
  modified_base 13: mod_base = OTHER; note = 2'O-methyl adenosine
  modified_base 14: mod_base = OTHER; note = 2'-fluoro guanosine
  modified_base 15: mod_base = OTHER; note = 2'O-methyl guanosine
  modified_base 16: mod_base = OTHER; note = 2'-fluoro guanosine
  modified_base 17: mod_base = OTHER; note = 2'O-methyl adenosine
  modified_base 18: mod_base = OTHER; note = 2'-fluoro uridine
  modified_base 19: mod_base = OTHER; note = 2'O-methyl adenosine phosphorothioate
  modified_base 20: mod_base = OTHER; note = 2'O-methyl uridine phosphorothioate
  modified_base 21: mod_base = OTHER; note = 2'O-methyl uridine
tctgaaggaaggagggatatt

SEQ ID NO: 1616 - RNA, 21 nt, synthetic construct
  source 1..21: mol_type = other RNA
  modified_base 1: mod_base = OTHER; note = 2'O-methyl cytidine phosphorothioate
  modified_base 2: mod_base = OTHER; note = 2'-fluoro guanosine phosphorothioate
  modified_base 3: mod_base = OTHER; note = 2'O-methyl cytidine
  modified_base 4: mod_base = OTHER; note = 2'-fluoro cytidine
  modified_base 5: mod_base = OTHER; note = 2'O-methyl uridine
  modified_base 6: mod_base = OTHER; note = 2'-fluoro cytidine
  modified_base 7: mod_base = OTHER; note = 2'O-methyl uridine
  modified_base 8: mod_base = OTHER; note = 2'-fluoro guanosine
  modified_base 9: mod_base = OTHER; note = 2'O-methyl adenosine
  modified_base 10: mod_base = OTHER; note = 2'-fluoro adenosine
  modified_base 11: mod_base = OTHER; note = 2'O-methyl guanosine
  modified_base 12: mod_base = OTHER; note = 2'-fluoro guanosine
  modified_base 13: mod_base = OTHER; note = 2'O-methyl adenosine
  modified_base 14: mod_base = OTHER; note = 2'-fluoro adenosine
  modified_base 15: mod_base = OTHER; note = 2'O-methyl guanosine
  modified_base 16: mod_base = OTHER; note = 2'-fluoro guanosine
  modified_base 17: mod_base = OTHER; note = 2'O-methyl adenosine
  modified_base 18: mod_base = OTHER; note = 2'-fluoro guanosine
  modified_base 19: mod_base = OTHER; note = 2'O-methyl guanosine phosphorothioate
  modified_base 20: mod_base = OTHER; note = 2'O-methyl uridine phosphorothioate
  modified_base 21: mod_base = OTHER; note = 2'O-methyl uridine
cgcctctgaaggaaggaggtt

SEQ ID NO: 1617 - RNA, 21 nt, synthetic construct
  source 1..21: mol_type = other RNA
  modified_base 1: mod_base = OTHER; note = 2'O-methyl adenosine phosphorothioate
  modified_base 2: mod_base = OTHER; note = 2'-fluoro cytidine phosphorothioate
  modified_base 3: mod_base = OTHER; note = 2'O-methyl guanosine
  modified_base 4: mod_base = OTHER; note = 2'-fluoro cytidine
  modified_base 5: mod_base = OTHER; note = 2'O-methyl cytidine
  modified_base 6: mod_base = OTHER; note = 2'-fluoro uridine
  modified_base 7: mod_base = OTHER; note = 2'O-methyl cytidine
  modified_base 8: mod_base = OTHER; note = 2'-fluoro uridine
  modified_base 9: mod_base = OTHER; note = 2'O-methyl guanosine
  modified_base 10: mod_base = OTHER; note = 2'-fluoro adenosine
  modified_base 11: mod_base = OTHER; note = 2'O-methyl adenosine
  modified_base 12: mod_base = OTHER; note = 2'-fluoro guanosine
  modified_base 13: mod_base = OTHER; note = 2'O-methyl guanosine
  modified_base 14: mod_base = OTHER; note = 2'-fluoro adenosine
  modified_base 15: mod_base = OTHER; note = 2'O-methyl adenosine
  modified_base 16: mod_base = OTHER; note = 2'-fluoro guanosine
  modified_base 17: mod_base = OTHER; note = 2'O-methyl guanosine
  modified_base 18: mod_base = OTHER; note = 2'-fluoro adenosine
  modified_base 19: mod_base = OTHER; note = 2'O-methyl guanosine phosphorothioate
  modified_base 20: mod_base = OTHER; note = 2'O-methyl uridine phosphorothioate
  modified_base 21: mod_base = OTHER; note = 2'O-methyl uridine
acgcctctgaaggaaggagtt

SEQ ID NO: 1618 - RNA, 21 nt, synthetic construct
  source 1..21: mol_type = other RNA
  modified_base 1: mod_base = OTHER; note = 2'O-methyl guanosine phosphorothioate
  modified_base 2: mod_base = OTHER; note = 2'-fluoro cytidine phosphorothioate
  modified_base 3: mod_base = OTHER; note = 2'O-methyl adenosine
  modified_base 4: mod_base = OTHER; note = 2'-fluoro cytidine
  modified_base 5: mod_base = OTHER; note = 2'O-methyl guanosine
  modified_base 6: mod_base = OTHER; note = 2'-fluoro cytidine
  modified_base 7: mod_base = OTHER; note = 2'O-methyl cytidine
  modified_base 8: mod_base = OTHER; note = 2'-fluoro uridine
  modified_base 9: mod_base = OTHER; note = 2'O-methyl cytidine
  modified_base 10: mod_base = OTHER; note = 2'-fluoro uridine
  modified_base 11: mod_base = OTHER; note = 2'O-methyl guanosine
  modified_base 12: mod_base = OTHER; note = 2'-fluoro adenosine
  modified_base 13: mod_base = OTHER; note = 2'O-methyl adenosine
  modified_base 14: mod_base = OTHER; note = 2'-fluoro guanosine
  modified_base 15: mod_base = OTHER; note = 2'O-methyl guanosine
  modified_base 16: mod_base = OTHER; note = 2'-fluoro adenosine
  modified_base 17: mod_base = OTHER; note = 2'O-methyl adenosine
  modified_base 18: mod_base = OTHER; note = 2'-fluoro guanosine
  modified_base 19: mod_base = OTHER; note = 2'O-methyl guanosine phosphorothioate
  modified_base 20: mod_base = OTHER; note = 2'O-methyl uridine phosphorothioate
  modified_base 21: mod_base = OTHER; note = 2'O-methyl uridine
gcacgcctctgaaggaaggtt

SEQ ID NO: 1619 - RNA, 21 nt, synthetic construct
  source 1..21: mol_type = other RNA
  modified_base 1: mod_base = OTHER; note = 2'O-methyl cytidine phosphorothioate
  modified_base 2: mod_base = OTHER; note = 2'-fluoro guanosine phosphorothioate
  modified_base 3: mod_base = OTHER; note = 2'O-methyl cytidine
  modified_base 4: mod_base = OTHER; note = 2'-fluoro adenosine
  modified_base 5: mod_base = OTHER; note = 2'O-methyl cytidine
  modified_base 6: mod_base = OTHER; note = 2'-fluoro guanosine
  modified_base 7: mod_base = OTHER; note = 2'O-methyl cytidine
  modified_base 8: mod_base = OTHER; note = 2'-fluoro cytidine
  modified_base 9: mod_base = OTHER; note = 2'O-methyl uridine
  modified_base 10: mod_base = OTHER; note = 2'-fluoro cytidine
  modified_base 11: mod_base = OTHER; note = 2'O-methyl uridine
  modified_base 12: mod_base = OTHER; note = 2'-fluoro guanosine
  modified_base 13: mod_base = OTHER; note = 2'O-methyl adenosine
  modified_base 14: mod_base = OTHER; note = 2'-fluoro adenosine
  modified_base 15: mod_base = OTHER; note = 2'O-methyl guanosine
  modified_base 16: mod_base = OTHER; note = 2'-fluoro guanosine
  modified_base 17: mod_base = OTHER; note = 2'O-methyl adenosine
  modified_base 18: mod_base = OTHER; note = 2'-fluoro adenosine
  modified_base 19: mod_base = OTHER; note = 2'O-methyl guanosine phosphorothioate
  modified_base 20: mod_base = OTHER; note = 2'O-methyl uridine phosphorothioate
  modified_base 21: mod_base = OTHER; note = 2'O-methyl uridine
cgcacgcctctgaaggaagtt

SEQ ID NO: 1620 - RNA, 21 nt, synthetic construct
  source 1..21: mol_type = other RNA
  modified_base 1: mod_base = OTHER; note = 2'O-methyl uridine phosphorothioate
  modified_base 2: mod_base = OTHER; note = 2'-fluoro cytidine phosphorothioate
  modified_base 3: mod_base = OTHER; note = 2'O-methyl guanosine
  modified_base 4: mod_base = OTHER; note = 2'-fluoro cytidine
  modified_base 5: mod_base = OTHER; note = 2'O-methyl adenosine
  modified_base 6: mod_base = OTHER; note = 2'-fluoro cytidine
  modified_base 7: mod_base = OTHER; note = 2'O-methyl guanosine
  modified_base 8: mod_base = OTHER; note = 2'-fluoro cytidine
  modified_base 9: mod_base = OTHER; note = 2'O-methyl cytidine
  modified_base 10: mod_base = OTHER; note = 2'-fluoro uridine
  modified_base 11: mod_base = OTHER; note = 2'O-methyl cytidine
  modified_base 12: mod_base = OTHER; note = 2'-fluoro uridine
  modified_base 13: mod_base = OTHER; note = 2'O-methyl guanosine
  modified_base 14: mod_base = OTHER; note = 2'-fluoro adenosine
  modified_base 15: mod_base = OTHER; note = 2'O-methyl adenosine
  modified_base 16: mod_base = OTHER; note = 2'-fluoro guanosine
  modified_base 17: mod_base = OTHER; note = 2'O-methyl guanosine
  modified_base 18: mod_base = OTHER; note = 2'-fluoro adenosine
  modified_base 19: mod_base = OTHER; note = 2'O-methyl adenosine phosphorothioate
  modified_base 20: mod_base = OTHER; note = 2'O-methyl uridine phosphorothioate
  modified_base 21: mod_base = OTHER; note = 2'O-methyl uridine
tcgcacgcctctgaaggaatt

SEQ ID NO: 1621 - RNA, 21 nt, synthetic construct
  source 1..21: mol_type = other RNA
  modified_base 1: mod_base = OTHER; note = 2'O-methyl adenosine phosphorothioate
  modified_base 2: mod_base = OTHER; note = 2'-fluoro uridine phosphorothioate
  modified_base 3: mod_base = OTHER; note = 2'O-methyl cytidine
  modified_base 4: mod_base = OTHER; note = 2'-fluoro guanosine
  modified_base 5: mod_base = OTHER; note = 2'O-methyl cytidine
  modified_base 6: mod_base = OTHER; note = 2'-fluoro adenosine
  modified_base 7: mod_base = OTHER; note = 2'O-methyl cytidine
  modified_base 8: mod_base = OTHER; note = 2'-fluoro guanosine
  modified_base 9: mod_base = OTHER; note = 2'O-methyl cytidine
  modified_base 10: mod_base = OTHER; note = 2'-fluoro cytidine
  modified_base 11: mod_base = OTHER; note = 2'O-methyl uridine
  modified_base 12: mod_base = OTHER; note = 2'-fluoro cytidine
  modified_base 13: mod_base = OTHER; note = 2'O-methyl uridine
  modified_base 14: mod_base = OTHER; note = 2'-fluoro guanosine
  modified_base 15: mod_base = OTHER; note = 2'O-methyl adenosine
  modified_base 16: mod_base = OTHER; note = 2'-fluoro adenosine
  modified_base 17: mod_base = OTHER; note = 2'O-methyl guanosine
  modified_base 18: mod_base = OTHER; note = 2'-fluoro guanosine
  modified_base 19: mod_base = OTHER; note = 2'O-methyl adenosine phosphorothioate
  modified_base 20: mod_base = OTHER; note = 2'O-methyl uridine phosphorothioate
  modified_base 21: mod_base = OTHER; note = 2'O-methyl uridine
atcgcacgcctctgaaggatt

SEQ ID NO: 1622 - RNA, 21 nt, synthetic construct
  source 1..21: mol_type = other RNA
  modified_base 1: mod_base = OTHER; note = 2'O-methyl uridine phosphorothioate
  modified_base 2: mod_base = OTHER; note = 2'-fluoro adenosine phosphorothioate
  modified_base 3: mod_base = OTHER; note = 2'O-methyl uridine
  modified_base 4: mod_base = OTHER; note = 2'-fluoro cytidine
  modified_base 5: mod_base = OTHER; note = 2'O-methyl guanosine
  modified_base 6: mod_base = OTHER; note = 2'-fluoro cytidine
  modified_base 7: mod_base = OTHER; note = 2'O-methyl adenosine
  modified_base 8: mod_base = OTHER; note = 2'-fluoro cytidine
  modified_base 9: mod_base = OTHER; note = 2'O-methyl guanosine
  modified_base 10: mod_base = OTHER; note = 2'-fluoro cytidine
  modified_base 11: mod_base = OTHER; note = 2'O-methyl cytidine
  modified_base 12: mod_base = OTHER; note = 2'-fluoro uridine
  modified_base 13: mod_base = OTHER; note = 2'O-methyl cytidine
  modified_base 14: mod_base = OTHER; note = 2'-fluoro uridine
  modified_base 15: mod_base = OTHER; note = 2'O-methyl guanosine
  modified_base 16: mod_base = OTHER; note = 2'-fluoro adenosine
  modified_base 17: mod_base = OTHER; note = 2'O-methyl adenosine
  modified_base 18: mod_base = OTHER; note = 2'-fluoro guanosine
  modified_base 19: mod_base = OTHER; note = 2'O-methyl guanosine phosphorothioate
  modified_base 20: mod_base = OTHER; note = 2'O-methyl uridine phosphorothioate
  modified_base 21: mod_base = OTHER; note = 2'O-methyl uridine
tatcgcacgcctctgaaggtt

SEQ ID NO: 1623 - RNA, 21 nt, synthetic construct
  source 1..21: mol_type = other RNA
  modified_base 1: mod_base = OTHER; note = 2'O-methyl cytidine phosphorothioate
  modified_base 2: mod_base = OTHER; note = 2'-fluoro adenosine phosphorothioate
  modified_base 3: mod_base = OTHER; note = 2'O-methyl cytidine
  modified_base 4: mod_base = OTHER; note = 2'-fluoro uridine
  modified_base 5: mod_base = OTHER; note = 2'O-methyl cytidine
  modified_base 6: mod_base = OTHER; note = 2'-fluoro cytidine
  modified_base 7: mod_base = OTHER; note = 2'O-methyl uridine
  modified_base 8: mod_base = OTHER; note = 2'-fluoro cytidine
  modified_base 9: mod_base = OTHER; note = 2'O-methyl cytidine
  modified_base 10: mod_base = OTHER; note = 2'-fluoro adenosine
  modified_base 11: mod_base = OTHER; note = 2'O-methyl uridine
  modified_base 12: mod_base = OTHER; note = 2'-fluoro cytidine
  modified_base 13: mod_base = OTHER; note = 2'O-methyl cytidine
  modified_base 14: mod_base = OTHER; note = 2'-fluoro adenosine
  modified_base 15: mod_base = OTHER; note = 2'O-methyl cytidine
  modified_base 16: mod_base = OTHER; note = 2'-fluoro adenosine
  modified_base 17: mod_base = OTHER; note = 2'O-methyl uridine
  modified_base 18: mod_base = OTHER; note = 2'-fluoro adenosine
  modified_base 19: mod_base = OTHER; note = 2'O-methyl uridine phosphorothioate
  modified_base 20: mod_base = OTHER; note = 2'O-methyl uridine phosphorothioate
  modified_base 21: mod_base = OTHER; note = 2'O-methyl uridine
cactcctccatccacatattt

SEQ ID NO: 1624 - RNA, 21 nt, synthetic construct
  source 1..21: mol_type = other RNA
  modified_base 1: mod_base = OTHER; note = 2'O-methyl uridine phosphorothioate
  modified_base 2: mod_base = OTHER; note = 2'-fluoro cytidine phosphorothioate
  modified_base 3: mod_base = OTHER; note = 2'O-methyl adenosine
  modified_base 4: mod_base = OTHER; note = 2'-fluoro cytidine
  modified_base 5: mod_base = OTHER; note = 2'O-methyl uridine
  modified_base 6: mod_base = OTHER; note = 2'-fluoro cytidine
  modified_base 7: mod_base = OTHER; note = 2'O-methyl adenosine
  modified_base 8: mod_base = OTHER; note = 2'-fluoro cytidine
  modified_base 9: mod_base = OTHER; note = 2'O-methyl uridine
  modified_base 10: mod_base = OTHER; note = 2'-fluoro cytidine
  modified_base 11: mod_base = OTHER; note = 2'O-methyl cytidine
  modified_base 12: mod_base = OTHER; note = 2'-fluoro uridine
  modified_base 13: mod_base = OTHER; note = 2'O-methyl cytidine
  modified_base 14: mod_base = OTHER; note = 2'-fluoro cytidine
  modified_base 15: mod_base = OTHER; note = 2'O-methyl adenosine
  modified_base 16: mod_base = OTHER; note = 2'-fluoro uridine
  modified_base 17: mod_base = OTHER; note = 2'O-methyl cytidine
  modified_base 18: mod_base = OTHER; note = 2'-fluoro cytidine
  modified_base 19: mod_base = OTHER; note = 2'O-methyl adenosine phosphorothioate
  modified_base 20: mod_base = OTHER; note = 2'O-methyl uridine phosphorothioate
  modified_base 21: mod_base = OTHER; note = 2'O-methyl uridine
tcactcactcctccatccatt

SEQ ID NO: 1625 - RNA, 21 nt, synthetic construct
  source 1..21: mol_type = other RNA
  modified_base 1: mod_base = OTHER; note = 2'O-methyl uridine phosphorothioate
  modified_base 2: mod_base = OTHER; note = 2'-fluoro uridine phosphorothioate
  modified_base 3: mod_base = OTHER; note = 2'O-methyl guanosine
  modified_base 4: mod_base = OTHER; note = 2'-fluoro uridine
  modified_base 5: mod_base = OTHER; note = 2'O-methyl cytidine
  modified_base 6: mod_base = OTHER; note = 2'-fluoro adenosine
  modified_base 7: mod_base = OTHER; note = 2'O-methyl cytidine
  modified_base 8: mod_base = OTHER; note = 2'-fluoro uridine
  modified_base 9: mod_base = OTHER; note = 2'O-methyl cytidine
  modified_base 10: mod_base = OTHER; note = 2'-fluoro adenosine
  modified_base 11: mod_base = OTHER; note = 2'O-methyl cytidine
  modified_base 12: mod_base = OTHER; note = 2'-fluoro uridine
  modified_base 13: mod_base = OTHER; note = 2'O-methyl cytidine
  modified_base 14: mod_base = OTHER; note = 2'-fluoro cytidine
  modified_base 15: mod_base = OTHER; note = 2'O-methyl uridine
  modified_base 16: mod_base = OTHER; note = 2'-fluoro cytidine
  modified_base 17: mod_base = OTHER; note = 2'O-methyl cytidine
  modified_base 18: mod_base = OTHER; note = 2'-fluoro adenosine
  modified_base 19: mod_base = OTHER; note = 2'O-methyl uridine phosphorothioate
  modified_base 20: mod_base = OTHER; note = 2'O-methyl uridine phosphorothioate
  modified_base 21: mod_base = OTHER; note = 2'O-methyl uridine
ttgtcactcactcctccattt

SEQ ID NO: 1626 - RNA, 21 nt, synthetic construct
  source 1..21: mol_type = other RNA
  modified_base 1: mod_base = OTHER; note = 2'O-methyl uridine phosphorothioate
  modified_base 2: mod_base = OTHER; note = 2'-fluoro adenosine phosphorothioate
  modified_base 3: mod_base = OTHER; note = 2'O-methyl cytidine
  modified_base 4: mod_base = OTHER; note = 2'-fluoro guanosine
  modified_base 5: mod_base = OTHER; note = 2'O-methyl uridine
  modified_base 6: mod_base = OTHER; note = 2'-fluoro uridine
  modified_base 7: mod_base = OTHER; note = 2'O-methyl guanosine
  modified_base 8: mod_base = OTHER; note = 2'-fluoro uridine
  modified_base 9: mod_base = OTHER; note = 2'O-methyl cytidine
  modified_base 10: mod_base = OTHER; note = 2'-fluoro adenosine
  modified_base 11: mod_base = OTHER; note = 2'O-methyl cytidine
  modified_base 12: mod_base = OTHER; note = 2'-fluoro uridine
  modified_base 13: mod_base = OTHER; note = 2'O-methyl cytidine
  modified_base 14: mod_base = OTHER; note = 2'-fluoro adenosine
  modified_base 15: mod_base = OTHER; note = 2'O-methyl cytidine
  modified_base 16: mod_base = OTHER; note = 2'-fluoro uridine
  modified_base 17: mod_base = OTHER; note = 2'O-methyl cytidine
  modified_base 18: mod_base = OTHER; note = 2'-fluoro cytidine
  modified_base 19: mod_base = OTHER; note = 2'O-methyl uridine phosphorothioate
  modified_base 20: mod_base = OTHER; note = 2'O-methyl uridine phosphorothioate
  modified_base 21: mod_base = OTHER; note = 2'O-methyl uridine
tacgttgtcactcactccttt

SEQ ID NO: 1627 - RNA, 21 nt, synthetic construct
  source 1..21: mol_type = other RNA
  modified_base 1: mod_base = OTHER; note = 2'O-methyl guanosine phosphorothioate
  modified_base 2: mod_base = OTHER; note = 2'-fluoro uridine phosphorothioate
  modified_base 3: mod_base = OTHER; note = 2'O-methyl adenosine
  modified_base 4: mod_base = OTHER; note = 2'-fluoro cytidine
  modified_base 5: mod_base = OTHER; note = 2'O-methyl guanosine
  modified_base 6: mod_base = OTHER; note = 2'-fluoro uridine
  modified_base 7: mod_base = OTHER; note = 2'O-methyl uridine
  modified_base 8: mod_base = OTHER; note = 2'-fluoro guanosine
  modified_base 9: mod_base = OTHER; note = 2'O-methyl uridine
  modified_base 10: mod_base = OTHER; note = 2'-fluoro cytidine
  modified_base 11: mod_base = OTHER; note = 2'O-methyl adenosine
  modified_base 12: mod_base = OTHER; note = 2'-fluoro cytidine
  modified_base 13: mod_base = OTHER; note = 2'O-methyl uridine
  modified_base 14: mod_base = OTHER; note = 2'-fluoro cytidine
  modified_base 15: mod_base = OTHER; note = 2'O-methyl adenosine
  modified_base 16: mod_base = OTHER; note = 2'-fluoro cytidine
  modified_base 17: mod_base = OTHER; note = 2'O-methyl uridine
  modified_base 18: mod_base = OTHER; note = 2'-fluoro cytidine
  modified_base 19: mod_base = OTHER; note = 2'O-methyl cytidine phosphorothioate
  modified_base 20: mod_base = OTHER; note = 2'O-methyl uridine phosphorothioate
  modified_base 21: mod_base = OTHER; note = 2'O-methyl uridine
gtacgttgtcactcactcctt

SEQ ID NO: 1628 - RNA, 21 nt, synthetic construct
  source 1..21: mol_type = other RNA
  modified_base 1: mod_base = OTHER; note = 2'O-methyl guanosine phosphorothioate
  modified_base 2: mod_base = OTHER; note = 2'-fluoro guanosine phosphorothioate
  modified_base 3: mod_base = OTHER; note = 2'O-methyl guanosine
  modified_base 4: mod_base = OTHER; note = 2'-fluoro uridine
  modified_base 5: mod_base = OTHER; note = 2'O-methyl adenosine
  modified_base 6: mod_base = OTHER; note = 2'-fluoro cytidine
  modified_base 7: mod_base = OTHER; note = 2'O-methyl guanosine
  modified_base 8: mod_base = OTHER; note = 2'-fluoro uridine
  modified_base 9: mod_base = OTHER; note = 2'O-methyl uridine
  modified_base 10: mod_base = OTHER; note = 2'-fluoro guanosine
  modified_base 11: mod_base = OTHER; note = 2'O-methyl uridine
  modified_base 12: mod_base = OTHER; note = 2'-fluoro cytidine
  modified_base 13: mod_base = OTHER; note = 2'O-methyl adenosine
  modified_base 14: mod_base = OTHER; note = 2'-fluoro cytidine
  modified_base 15: mod_base = OTHER; note = 2'O-methyl uridine
  modified_base 16: mod_base = OTHER; note = 2'-fluoro cytidine
  modified_base 17: mod_base = OTHER; note = 2'O-methyl adenosine
  modified_base 18: mod_base = OTHER; note = 2'-fluoro cytidine
  modified_base 19: mod_base = OTHER; note = 2'O-methyl uridine phosphorothioate
  modified_base 20: mod_base = OTHER; note = 2'O-methyl uridine phosphorothioate
  modified_base 21: mod_base = OTHER; note = 2'O-methyl uridine
gggtacgttgtcactcacttt

SEQ ID NO: 1629 - RNA, 21 nt, synthetic construct
  source 1..21: mol_type = other RNA
  modified_base 1: mod_base = OTHER; note = 2'O-methyl adenosine phosphorothioate
  modified_base 2: mod_base = OTHER; note = 2'-fluoro guanosine phosphorothioate
  modified_base 3: mod_base = OTHER; note = 2'O-methyl guanosine
  modified_base 4: mod_base = OTHER; note = 2'-fluoro guanosine
  modified_base 5: mod_base = OTHER; note = 2'O-methyl uridine
  modified_base 6: mod_base = OTHER; note = 2'-fluoro adenosine
  modified_base 7: mod_base = OTHER; note = 2'O-methyl cytidine
  modified_base 8: mod_base = OTHER; note = 2'-fluoro guanosine
  modified_base 9: mod_base = OTHER; note = 2'O-methyl uridine
  modified_base 10: mod_base = OTHER; note = 2'-fluoro uridine
  modified_base 11: mod_base = OTHER; note = 2'O-methyl guanosine
  modified_base 12: mod_base = OTHER; note = 2'-fluoro uridine
  modified_base 13: mod_base = OTHER; note = 2'O-methyl cytidine
  modified_base 14: mod_base = OTHER; note = 2'-fluoro adenosine
  modified_base 15: mod_base = OTHER; note = 2'O-methyl cytidine
  modified_base 16: mod_base = OTHER; note = 2'-fluoro uridine
  modified_base 17: mod_base = OTHER; note = 2'O-methyl cytidine
  modified_base 18: mod_base = OTHER; note = 2'-fluoro adenosine
  modified_base 19: mod_base = OTHER; note = 2'O-methyl cytidine phosphorothioate
  modified_base 20: mod_base = OTHER; note = 2'O-methyl uridine phosphorothioate
  modified_base 21: mod_base = OTHER; note = 2'O-methyl uridine
agggtacgttgtcactcactt

SEQ ID NO: 1630 - RNA, 21 nt, synthetic construct
  source 1..21: mol_type = other RNA
  modified_base 1: mod_base = OTHER; note = 2'O-methyl guanosine phosphorothioate
  modified_base 2: mod_base = OTHER; note = 2'-fluoro adenosine phosphorothioate
  modified_base 3: mod_base = OTHER; note = 2'O-methyl adenosine
  modified_base 4: mod_base = OTHER; note = 2'-fluoro guanosine
  modified_base 5: mod_base = OTHER; note = 2'O-methyl guanosine
  modified_base 6: mod_base = OTHER; note = 2'-fluoro guanosine
  modified_base 7: mod_base = OTHER; note = 2'O-methyl uridine
  modified_base 8: mod_base = OTHER; note = 2'-fluoro adenosine
  modified_base 9: mod_base = OTHER; note = 2'O-methyl cytidine
  modified_base 10: mod_base = OTHER; note = 2'-fluoro guanosine
  modified_base 11: mod_base = OTHER; note = 2'O-methyl uridine
  modified_base 12: mod_base = OTHER; note = 2'-fluoro uridine
  modified_base 13: mod_base = OTHER; note = 2'O-methyl guanosine
  modified_base 14: mod_base = OTHER; note = 2'-fluoro uridine
  modified_base 15: mod_base = OTHER; note = 2'O-methyl cytidine
  modified_base 16: mod_base = OTHER; note = 2'-fluoro adenosine
  modified_base 17: mod_base = OTHER; note = 2'O-methyl cytidine
  modified_base 18: mod_base = OTHER; note = 2'-fluoro uridine
  modified_base 19: mod_base = OTHER; note = 2'O-methyl cytidine phosphorothioate
  modified_base 20: mod_base = OTHER; note = 2'O-methyl uridine phosphorothioate
  modified_base 21: mod_base = OTHER; note = 2'O-methyl uridine
gaagggtacgttgtcactctt

SEQ ID NO: 1631 - RNA, 21 nt, synthetic construct
  source 1..21: mol_type = other RNA
  modified_base 1: mod_base = OTHER; note = 2'O-methyl guanosine phosphorothioate
  modified_base 2: mod_base = OTHER; note = 2'-fluoro uridine phosphorothioate
  modified_base 3: mod_base = OTHER; note = 2'O-methyl guanosine
  modified_base 4: mod_base = OTHER; note = 2'-fluoro adenosine
  modified_base 5: mod_base = OTHER; note = 2'O-methyl uridine
  modified_base 6: mod_base = OTHER; note = 2'-fluoro guanosine
  modified_base 7: mod_base = OTHER; note = 2'O-methyl guanosine
  modified_base 8: mod_base = OTHER; note = 2'-fluoro uridine
  modified_base 9: mod_base = OTHER; note = 2'O-methyl uridine
  modified_base 10: mod_base = OTHER; note = 2'-fluoro guanosine
  modified_base 11: mod_base = OTHER; note = 2'O-methyl uridine
  modified_base 12: mod_base = OTHER; note = 2'-fluoro uridine
  modified_base 13: mod_base = OTHER; note = 2'O-methyl uridine
  modified_base 14: mod_base = OTHER; note = 2'-fluoro uridine
  modified_base 15: mod_base = OTHER; note = 2'O-methyl guanosine
  modified_base 16: mod_base = OTHER; note = 2'-fluoro guanosine
  modified_base 17: mod_base = OTHER; note = 2'O-methyl cytidine
  modified_base 18: mod_base = OTHER; note = 2'-fluoro adenosine
  modified_base 19: mod_base = OTHER; note = 2'O-methyl uridine phosphorothioate
  modified_base 20: mod_base = OTHER; note = 2'O-methyl uridine phosphorothioate
  modified_base 21: mod_base = OTHER; note = 2'O-methyl uridine
gtgatggttgttttggcattt

SEQ ID NO: 1632 - RNA, 21 nt, synthetic construct
  source 1..21: mol_type = other RNA
  modified_base 1: mod_base = OTHER; note = 2'O-methyl guanosine phosphorothioate
  modified_base 2: mod_base = OTHER; note = 2'-fluoro guanosine phosphorothioate
  modified_base 3: mod_base = OTHER; note = 2'O-methyl uridine
  modified_base 4: mod_base = OTHER; note = 2'-fluoro guanosine
  modified_base 5: mod_base = OTHER; note = 2'O-methyl adenosine
  modified_base 6: mod_base = OTHER; note = 2'-fluoro uridine
  modified_base 7: mod_base = OTHER; note = 2'O-methyl guanosine
  modified_base 8: mod_base = OTHER; note = 2'-fluoro guanosine
  modified_base 9: mod_base = OTHER; note = 2'O-methyl uridine
  modified_base 10: mod_base = OTHER; note = 2'-fluoro uridine
  modified_base 11: mod_base = OTHER; note = 2'O-methyl guanosine
  modified_base 12: mod_base = OTHER; note = 2'-fluoro uridine
  modified_base 13: mod_base = OTHER; note = 2'O-methyl uridine
  modified_base 14: mod_base = OTHER; note = 2'-fluoro uridine
  modified_base 15: mod_base = OTHER; note = 2'O-methyl uridine
  modified_base 16: mod_base = OTHER; note = 2'-fluoro guanosine
  modified_base 17: mod_base = OTHER; note = 2'O-methyl guanosine
  modified_base 18: mod_base = OTHER; note = 2'-fluoro cytidine
  modified_base 19: mod_base = OTHER; note = 2'O-methyl adenosine phosphorothioate
  modified_base 20: mod_base = OTHER; note = 2'O-methyl uridine phosphorothioate
  modified_base 21: mod_base = OTHER; note = 2'O-methyl uridine
ggtgatggttgttttggcatt

SEQ ID NO: 1633 - RNA, 21 nt, synthetic construct
  source 1..21: mol_type = other RNA
  modified_base 1: mod_base = OTHER; note = 2'O-methyl cytidine phosphorothioate
  modified_base 2: mod_base = OTHER; note = 2'-fluoro guanosine phosphorothioate
  modified_base 3: mod_base = OTHER; note = 2'O-methyl guanosine
  modified_base 4: mod_base = OTHER; note = 2'-fluoro uridine
  modified_base 5: mod_base = OTHER; note = 2'O-methyl guanosine
  modified_base 6: mod_base = OTHER; note = 2'-fluoro adenosine
  modified_base 7: mod_base = OTHER; note = 2'O-methyl uridine
  modified_base 8: mod_base = OTHER; note = 2'-fluoro guanosine
  modified_base 9: mod_base = OTHER; note = 2'O-methyl guanosine
  modified_base 10: mod_base = OTHER; note = 2'-fluoro uridine
  modified_base 11: mod_base = OTHER; note = 2'O-methyl uridine
  modified_base 12: mod_base = OTHER; note = 2'-fluoro guanosine
  modified_base 13: mod_base = OTHER; note = 2'O-methyl uridine
  modified_base 14: mod_base = OTHER; note = 2'-fluoro uridine
  modified_base 15: mod_base = OTHER; note = 2'O-methyl uridine
  modified_base 16: mod_base = OTHER; note = 2'-fluoro uridine
  modified_base 17: mod_base = OTHER; note = 2'O-methyl guanosine
  modified_base 18: mod_base = OTHER; note = 2'-fluoro guanosine
  modified_base 19: mod_base = OTHER; note = 2'O-methyl cytidine phosphorothioate
  modified_base 20: mod_base = OTHER; note = 2'O-methyl uridine phosphorothioate
  modified_base 21: mod_base = OTHER; note = 2'O-methyl uridine
cggtgatggttgttttggctt

SEQ ID NO: 1634 - RNA, 21 nt, synthetic construct
  source 1..21: mol_type = other RNA
  modified_base 1: mod_base = OTHER; note = 2'O-methyl adenosine phosphorothioate
  modified_base 2: mod_base = OTHER; note = 2'-fluoro cytidine phosphorothioate
  modified_base 3: mod_base = OTHER; note = 2'O-methyl adenosine
  modified_base 4: mod_base = OTHER; note = 2'-fluoro cytidine
  modified_base 5: mod_base = OTHER; note = 2'O-methyl guanosine
  modified_base 6: mod_base = OTHER; note = 2'-fluoro guanosine
  modified_base 7: mod_base = OTHER; note = 2'O-methyl uridine
  modified_base 8: mod_base = OTHER; note = 2'-fluoro guanosine
  modified_base 9: mod_base = OTHER; note = 2'O-methyl adenosine
  modified_base 10: mod_base = OTHER; note = 2'-fluoro uridine
  modified_base 11: mod_base = OTHER; note = 2'O-methyl guanosine
  modified_base 12: mod_base = OTHER; note = 2'-fluoro guanosine
  modified_base 13: mod_base = OTHER; note = 2'O-methyl uridine
  modified_base 14: mod_base = OTHER; note = 2'-fluoro uridine
  modified_base 15: mod_base = OTHER; note = 2'O-methyl guanosine
  modified_base 16: mod_base = OTHER; note = 2'-fluoro uridine
  modified_base 17: mod_base = OTHER; note = 2'O-methyl uridine
  modified_base 18: mod_base = OTHER; note = 2'-fluoro uridine
  modified_base 19: mod_base = OTHER; note = 2'O-methyl uridine phosphorothioate
  modified_base 20: mod_base = OTHER; note = 2'O-methyl uridine phosphorothioate
  modified_base 21: mod_base = OTHER; note = 2'O-methyl uridine
acacggtgatggttgtttttt

SEQ ID NO: 1635 - RNA, 21 nt, synthetic construct
  source 1..21: mol_type = other RNA
  modified_base 1: mod_base = OTHER; note = 2'O-methyl guanosine phosphorothioate
  modified_base 2: mod_base = OTHER; note = 2'-fluoro adenosine phosphorothioate
  modified_base 3: mod_base = OTHER; note = 2'O-methyl cytidine
  modified_base 4: mod_base = OTHER; note = 2'-fluoro adenosine
  modified_base 5: mod_base = OTHER; note = 2'O-methyl cytidine
  modified_base 6: mod_base = OTHER; note = 2'-fluoro guanosine
  modified_base 7: mod_base = OTHER; note = 2'O-methyl guanosine
  modified_base 8: mod_base = OTHER; note = 2'-fluoro uridine
  modified_base 9: mod_base = OTHER; note = 2'O-methyl guanosine
  modified_base 10: mod_base = OTHER; note = 2'-fluoro adenosine
  modified_base 11: mod_base = OTHER; note = 2'O-methyl uridine
  modified_base 12: mod_base = OTHER; note = 2'-fluoro guanosine
  modified_base 13: mod_base = OTHER; note = 2'O-methyl guanosine
  modified_base 14: mod_base = OTHER; note = 2'-fluoro uridine
  modified_base 15: mod_base = OTHER; note = 2'O-methyl uridine
  modified_base 16: mod_base = OTHER; note = 2'-fluoro guanosine
  modified_base 17: mod_base = OTHER; note = 2'O-methyl uridine
  modified_base 18: mod_base = OTHER; note = 2'-fluoro uridine
  modified_base 19: mod_base = OTHER; note = 2'O-methyl uridine phosphorothioate
  modified_base 20: mod_base = OTHER; note = 2'O-methyl uridine phosphorothioate
  modified_base 21: mod_base = OTHER; note = 2'O-methyl uridine
gacacggtgatggttgttttt

SEQ ID NO: 1636 - RNA, 21 nt, synthetic construct
  source 1..21: mol_type = other RNA
  modified_base 1: mod_base = OTHER; note = 2'O-methyl guanosine phosphorothioate
  modified_base 2: mod_base = OTHER; note = 2'-fluoro guanosine phosphorothioate
  modified_base 3: mod_base = OTHER; note = 2'O-methyl guanosine
  modified_base 4: mod_base = OTHER; note = 2'-fluoro adenosine
  modified_base 5: mod_base = OTHER; note = 2'O-methyl cytidine
  modified_base 6: mod_base = OTHER; note = 2'-fluoro adenosine
  modified_base 7: mod_base = OTHER; note = 2'O-methyl cytidine
  modified_base 8: mod_base = OTHER; note = 2'-fluoro guanosine
  modified_base 9: mod_base = OTHER; note = 2'O-methyl guanosine
  modified_base 10: mod_base = OTHER; note = 2'-fluoro uridine
  modified_base 11: mod_base = OTHER; note = 2'O-methyl guanosine
  modified_base 12: mod_base = OTHER; note = 2'-fluoro adenosine
  modified_base 13: mod_base = OTHER; note = 2'O-methyl uridine
  modified_base 14: mod_base = OTHER; note = 2'-fluoro guanosine
  modified_base 15: mod_base = OTHER; note = 2'O-methyl guanosine
  modified_base 16: mod_base = OTHER; note = 2'-fluoro uridine
  modified_base 17: mod_base = OTHER; note = 2'O-methyl uridine
  modified_base 18: mod_base = OTHER; note = 2'-fluoro guanosine
  modified_base 19: mod_base = OTHER; note = 2'O-methyl uridine phosphorothioate
  modified_base 20: mod_base = OTHER; note = 2'O-methyl uridine phosphorothioate
  modified_base 21: mod_base = OTHER; note = 2'O-methyl uridine
gggacacggtgatggttgttt

SEQ ID NO: 1637 - RNA, 21 nt, synthetic construct
  source 1..21: mol_type = other RNA
  modified_base 1: mod_base = OTHER; note = 2'O-methyl guanosine phosphorothioate
  modified_base 2: mod_base = OTHER; note = 2'-fluoro guanosine phosphorothioate
  modified_base 3: mod_base = OTHER; note = 2'O-methyl guanosine
  modified_base 4: mod_base = OTHER; note = 2'-fluoro guanosine
  modified_base 5: mod_base = OTHER; note = 2'O-methyl adenosine
  modified_base 6: mod_base = OTHER; note = 2'-fluoro cytidine
  modified_base 7: mod_base = OTHER; note = 2'O-methyl adenosine
  modified_base 8: mod_base = OTHER; note = 2'-fluoro cytidine
  modified_base 9: mod_base = OTHER; note = 2'O-methyl guanosine
  modified_base 10: mod_base = OTHER; note = 2'-fluoro guanosine
  modified_base 11: mod_base = OTHER; note = 2'O-methyl uridine
  modified_base 12: mod_base = OTHER; note = 2'-fluoro guanosine
  modified_base 13: mod_base = OTHER; note = 2'O-methyl adenosine
  modified_base 14: mod_base = OTHER; note = 2'-fluoro uridine
  modified_base 15: mod_base = OTHER; note = 2'O-methyl guanosine
  modified_base 16: mod_base = OTHER; note = 2'-fluoro guanosine
  modified_base 17: mod_base = OTHER; note = 2'O-methyl uridine
  modified_base 18: mod_base = OTHER; note = 2'-fluoro uridine
  modified_base 19: mod_base = OTHER; note = 2'O-methyl guanosine phosphorothioate
  modified_base 20: mod_base = OTHER; note = 2'O-methyl uridine phosphorothioate
  modified_base 21: mod_base = OTHER; note = 2'O-methyl uridine
ggggacacggtgatggttgtt

SEQ ID NO: 1638 - RNA, 21 nt, synthetic construct
  source 1..21: mol_type = other RNA
  modified_base 1: mod_base = OTHER; note = 2'O-methyl guanosine phosphorothioate
  modified_base 2: mod_base = OTHER; note = 2'-fluoro guanosine phosphorothioate
  modified_base 3: mod_base = OTHER; note = 2'O-methyl guanosine
  modified_base 4: mod_base = OTHER; note = 2'-fluoro guanosine
  modified_base 5: mod_base = OTHER; note = 2'O-methyl guanosine
  modified_base 6: mod_base = OTHER; note = 2'-fluoro adenosine
  modified_base 7: mod_base = OTHER; note = 2'O-methyl cytidine
  modified_base 8: mod_base = OTHER; note = 2'-fluoro adenosine
  modified_base 9: mod_base = OTHER; note = 2'O-methyl cytidine
  modified_base 10: mod_base = OTHER; note = 2'-fluoro guanosine
  modified_base 11: mod_base = OTHER; note = 2'O-methyl guanosine
  modified_base 12: mod_base = OTHER; note = 2'-fluoro uridine
  modified_base 13: mod_base = OTHER; note = 2'O-methyl guanosine
  modified_base 14: mod_base = OTHER; note = 2'-fluoro adenosine
  modified_base 15: mod_base = OTHER; note = 2'O-methyl uridine
  modified_base 16: mod_base = OTHER; note = 2'-fluoro guanosine
  modified_base 17: mod_base = OTHER; note = 2'O-methyl guanosine
  modified_base 18: mod_base = OTHER; note = 2'-fluoro uridine
  modified_base 19: mod_base = OTHER; note = 2'O-methyl uridine phosphorothioate
  modified_base 20: mod_base = OTHER; note = 2'O-methyl uridine phosphorothioate
  modified_base 21: mod_base = OTHER; note = 2'O-methyl uridine
gggggacacggtgatggtttt

SEQ ID NO: 1639 - RNA, 21 nt, synthetic construct
  source 1..21: mol_type = other RNA
  modified_base 1: mod_base = OTHER; note = 2'O-methyl adenosine phosphorothioate
  modified_base 2: mod_base = OTHER; note = 2'-fluoro uridine phosphorothioate
  modified_base 3: mod_base = OTHER; note = 2'O-methyl adenosine
  modified_base 4: mod_base = OTHER; note = 2'-fluoro guanosine
  modified_base 5: mod_base = OTHER; note = 2'O-methyl adenosine
  modified_base 6: mod_base = OTHER; note = 2'-fluoro adenosine
  modified_base 7: mod_base = OTHER; note = 2'O-methyl guanosine
  modified_base 8: mod_base = OTHER; note = 2'-fluoro guanosine
  modified_base 9: mod_base = OTHER; note = 2'O-methyl guanosine
  modified_base 10: mod_base = OTHER; note = 2'-fluoro guanosine
  modified_base 11: mod_base = OTHER; note = 2'O-methyl guanosine
  modified_base 12: mod_base = OTHER; note = 2'-fluoro adenosine
  modified_base 13: mod_base = OTHER; note = 2'O-methyl cytidine
  modified_base 14: mod_base = OTHER; note = 2'-fluoro adenosine
  modified_base 15: mod_base = OTHER; note = 2'O-methyl cytidine
  modified_base 16: mod_base = OTHER; note = 2'-fluoro guanosine
  modified_base 17: mod_base = OTHER; note = 2'O-methyl guanosine
  modified_base 18: mod_base = OTHER; note = 2'-fluoro uridine
  modified_base 19: mod_base = OTHER; note = 2'O-methyl guanosine phosphorothioate
  modified_base 20: mod_base = OTHER; note = 2'O-methyl uridine phosphorothioate
  modified_base 21: mod_base = OTHER; note = 2'O-methyl uridine
atagaagggggacacggtgtt

SEQ ID NO: 1640 - RNA, 21 nt, synthetic construct
  source 1..21: mol_type = other RNA
  modified_base 1: mod_base = OTHER; note = 2'O-methyl cytidine phosphorothioate
  modified_base 2: mod_base = OTHER; note = 2'-fluoro adenosine phosphorothioate
  modified_base 3: mod_base = OTHER; note = 2'O-methyl uridine
  modified_base 4: mod_base = OTHER; note = 2'-fluoro adenosine
  modified_base 5: mod_base = OTHER; note = 2'O-methyl guanosine
  modified_base 6: mod_base = OTHER; note = 2'-fluoro adenosine
  modified_base 7: mod_base = OTHER; note = 2'O-methyl adenosine
  modified_base 8: mod_base = OTHER; note = 2'-fluoro guanosine
  modified_base 9: mod_base = OTHER; note = 2'O-methyl guanosine
  modified_base 10: mod_base = OTHER; note = 2'-fluoro guanosine
  modified_base 11: mod_base = OTHER; note = 2'O-methyl guanosine
  modified_base 12: mod_base = OTHER; note = 2'-fluoro guanosine
  modified_base 13: mod_base = OTHER; note = 2'O-methyl adenosine
  modified_base 14: mod_base = OTHER; note = 2'-fluoro cytidine
  modified_base 15: mod_base = OTHER; note = 2'O-methyl adenosine
  modified_base 16: mod_base = OTHER; note = 2'-fluoro cytidine
  modified_base 17: mod_base = OTHER; note = 2'O-methyl guanosine
  modified_base 18: mod_base = OTHER; note = 2'-fluoro guanosine
  modified_base 19: mod_base = OTHER; note = 2'O-methyl uridine phosphorothioate
  modified_base 20: mod_base = OTHER; note = 2'O-methyl uridine phosphorothioate
  modified_base 21: mod_base = OTHER; note = 2'O-methyl uridine
catagaagggggacacggttt

SEQ ID NO: 1641 - RNA, 21 nt, synthetic construct
  source 1..21: mol_type = other RNA
  modified_base 1: mod_base = OTHER; note = 2'O-methyl cytidine phosphorothioate
  modified_base 2: mod_base = OTHER; note = 2'-fluoro cytidine phosphorothioate
  modified_base 3: mod_base = OTHER; note = 2'O-methyl cytidine
  modified_base 4: mod_base = OTHER; note = 2'-fluoro cytidine
  modified_base 5: mod_base = OTHER; note = 2'O-methyl adenosine
  modified_base 6: mod_base = OTHER; note = 2'-fluoro uridine
  modified_base 7: mod_base = OTHER; note = 2'O-methyl adenosine
  modified_base 8: mod_base = OTHER; note = 2'-fluoro guanosine
  modified_base 9: mod_base = OTHER; note = 2'O-methyl adenosine
  modified_base 10: mod_base = OTHER; note = 2'-fluoro adenosine
  modified_base 11: mod_base = OTHER; note = 2'O-methyl guanosine
  modified_base 12: mod_base = OTHER; note = 2'-fluoro guanosine
  modified_base 13: mod_base = OTHER; note = 2'O-methyl guanosine
  modified_base 14: mod_base = OTHER; note = 2'-fluoro guanosine
  modified_base 15: mod_base = OTHER; note = 2'O-methyl guanosine
  modified_base 16: mod_base = OTHER; note = 2'-fluoro adenosine
  modified_base 17: mod_base = OTHER; note = 2'O-methyl cytidine
  modified_base 18: mod_base = OTHER; note = 2'-fluoro adenosine
  modified_base 19: mod_base = OTHER; note = 2'O-methyl cytidine phosphorothioate
  modified_base 20: mod_base = OTHER; note = 2'O-methyl uridine phosphorothioate
  modified_base 21: mod_base = OTHER; note = 2'O-methyl uridine
ccccatagaagggggacactt

SEQ ID NO: 1642 - RNA, 21 nt, synthetic construct
  source 1..21: mol_type = other RNA
  modified_base 1: mod_base = OTHER; note = 2'O-methyl uridine phosphorothioate
  modified_base 2: mod_base = OTHER; note = 2'-fluoro cytidine phosphorothioate
  modified_base 3: mod_base = OTHER; note = 2'O-methyl cytidine
  modified_base 4: mod_base = OTHER; note = 2'-fluoro cytidine
  modified_base 5: mod_base = OTHER; note = 2'O-methyl cytidine
  modified_base 6: mod_base = OTHER; note = 2'-fluoro adenosine
  modified_base 7: mod_base = OTHER; note = 2'O-methyl uridine
  modified_base 8: mod_base = OTHER; note = 2'-fluoro adenosine
  modified_base 9: mod_base = OTHER; note = 2'O-methyl guanosine
  modified_base 10: mod_base = OTHER; note = 2'-fluoro adenosine
  modified_base 11: mod_base = OTHER; note = 2'O-methyl adenosine
  modified_base 12: mod_base = OTHER; note = 2'-fluoro guanosine
  modified_base 13: mod_base = OTHER; note = 2'O-methyl guanosine
  modified_base 14: mod_base = OTHER; note = 2'-fluoro guanosine
  modified_base 15: mod_base = OTHER; note = 2'O-methyl guanosine
  modified_base 16: mod_base = OTHER; note = 2'-fluoro guanosine
  modified_base 17: mod_base = OTHER; note = 2'O-methyl adenosine
  modified_base 18: mod_base = OTHER; note = 2'-fluoro cytidine
  modified_base 19: mod_base = OTHER; note = 2'O-methyl adenosine phosphorothioate
  modified_base 20: mod_base = OTHER; note = 2'O-methyl uridine phosphorothioate
  modified_base 21: mod_base = OTHER; note = 2'O-methyl uridine
tccccatagaagggggacatt

SEQ ID NO: 1643 - RNA, 21 nt, synthetic construct
  source 1..21: mol_type = other RNA
  modified_base 1: mod_base = OTHER; note = 2'O-methyl cytidine phosphorothioate
  modified_base 2: mod_base = OTHER; note = 2'-fluoro uridine phosphorothioate
  modified_base 3: mod_base = OTHER; note = 2'O-methyl cytidine
  modified_base 4: mod_base = OTHER; note = 2'-fluoro cytidine
  modified_base 5: mod_base = OTHER; note = 2'O-methyl cytidine
  modified_base 6: mod_base = OTHER; note = 2'-fluoro cytidine
  modified_base 7: mod_base = OTHER; note = 2'O-methyl adenosine
  modified_base 8: mod_base = OTHER; note = 2'-fluoro uridine
  modified_base 9: mod_base = OTHER; note = 2'O-methyl adenosine
  modified_base 10: mod_base = OTHER; note = 2'-fluoro guanosine
  modified_base 11: mod_base = OTHER; note = 2'O-methyl adenosine
  modified_base 12: mod_base = OTHER; note = 2'-fluoro adenosine
  modified_base 13: mod_base = OTHER; note = 2'O-methyl guanosine
  modified_base 14: mod_base = OTHER; note = 2'-fluoro guanosine
  modified_base 15: mod_base = OTHER; note = 2'O-methyl guanosine
  modified_base 16: mod_base = OTHER; note = 2'-fluoro guanosine
  modified_base 17: mod_base = OTHER; note = 2'O-methyl guanosine
  modified_base 18: mod_base = OTHER; note = 2'-fluoro adenosine
  modified_base 19: mod_base = OTHER; note = 2'O-methyl cytidine phosphorothioate
  modified_base 20: mod_base = OTHER; note = 2'O-methyl uridine phosphorothioate
  modified_base 21: mod_base = OTHER; note = 2'O-methyl uridine
ctccccatagaagggggactt

SEQ ID NO: 1644 - RNA, 21 nt, synthetic construct
  source 1..21: mol_type = other RNA
  modified_base 1: mod_base = OTHER; note = 2'O-methyl adenosine phosphorothioate
  modified_base 2: mod_base = OTHER; note = 2'-fluoro cytidine phosphorothioate
  modified_base 3: mod_base = OTHER; note = 2'O-methyl uridine
  modified_base 4: mod_base = OTHER; note = 2'-fluoro cytidine
  modified_base 5: mod_base = OTHER; note = 2'O-methyl cytidine
  modified_base 6: mod_base = OTHER; note = 2'-fluoro cytidine
  modified_base 7: mod_base = OTHER; note = 2'O-methyl cytidine
  modified_base 8: mod_base = OTHER; note = 2'-fluoro adenosine
  modified_base 9: mod_base = OTHER; note = 2'O-methyl uridine
  modified_base 10: mod_base = OTHER; note = 2'-fluoro adenosine
  modified_base 11: mod_base = OTHER; note = 2'O-methyl guanosine
  modified_base 12: mod_base = OTHER; note = 2'-fluoro adenosine
  modified_base 13: mod_base = OTHER; note = 2'O-methyl adenosine
  modified_base 14: mod_base = OTHER; note = 2'-fluoro guanosine
  modified_base 15: mod_base = OTHER; note = 2'O-methyl guanosine
  modified_base 16: mod_base = OTHER; note = 2'-fluoro guanosine
  modified_base 17: mod_base = OTHER; note = 2'O-methyl guanosine
  modified_base 18: mod_base = OTHER; note = 2'-fluoro guanosine
  modified_base 19: mod_base = OTHER; note = 2'O-methyl adenosine phosphorothioate
  modified_base 20: mod_base = OTHER; note = 2'O-methyl uridine phosphorothioate
  modified_base 21: mod_base = OTHER; note = 2'O-methyl uridine
actccccatagaagggggatt

SEQ ID NO: 1645 - RNA, 21 nt, synthetic construct
  source 1..21: mol_type = other RNA
  modified_base 1: mod_base = OTHER; note = 2'O-methyl cytidine phosphorothioate
  modified_base 2: mod_base = OTHER; note = 2'-fluoro guanosine phosphorothioate
  modified_base 3: mod_base = OTHER; note = 2'O-methyl uridine
  modified_base 4: mod_base = OTHER; note = 2'-fluoro adenosine
  modified_base 5: mod_base = OTHER; note = 2'O-methyl cytidine
  modified_base 6: mod_base = OTHER; note = 2'-fluoro uridine
  modified_base 7: mod_base = OTHER; note = 2'O-methyl cytidine
  modified_base 8: mod_base = OTHER; note = 2'-fluoro cytidine
  modified_base 9: mod_base = OTHER; note = 2'O-methyl cytidine
  modified_base 10: mod_base = OTHER; note = 2'-fluoro cytidine
  modified_base 11: mod_base = OTHER; note = 2'O-methyl adenosine
  modified_base 12: mod_base = OTHER; note = 2'-fluoro uridine
  modified_base 13: mod_base = OTHER; note = 2'O-methyl adenosine
  modified_base 14: mod_base = OTHER; note = 2'-fluoro guanosine
  modified_base 15: mod_base = OTHER; note = 2'O-methyl adenosine
  modified_base 16: mod_base = OTHER; note = 2'-fluoro adenosine
  modified_base 17: mod_base = OTHER; note = 2'O-methyl guanosine
  modified_base 18: mod_base = OTHER; note = 2'-fluoro guanosine
  modified_base 19: mod_base = OTHER; note = 2'O-methyl guanosine phosphorothioate
  modified_base 20: mod_base = OTHER; note = 2'O-methyl uridine phosphorothioate
  modified_base 21: mod_base = OTHER; note = 2'O-methyl uridine
cgtactccccatagaagggtt

SEQ ID NO: 1646 - RNA, 21 nt, synthetic construct
  source 1..21: mol_type = other RNA
  modified_base 1: mod_base = OTHER; note = 2'O-methyl uridine phosphorothioate
  modified_base 2: mod_base = OTHER; note = 2'-fluoro cytidine phosphorothioate
  modified_base 3: mod_base = OTHER; note = 2'O-methyl guanosine
  modified_base 4: mod_base = OTHER; note = 2'-fluoro uridine
  modified_base 5: mod_base = OTHER; note = 2'O-methyl adenosine
  modified_base 6: mod_base = OTHER; note = 2'-fluoro cytidine
  modified_base 7: mod_base = OTHER; note = 2'O-methyl uridine
  modified_base 8: mod_base = OTHER; note = 2'-fluoro cytidine
  modified_base 9: mod_base = OTHER; note = 2'O-methyl cytidine
  modified_base 10: mod_base = OTHER; note = 2'-fluoro cytidine
  modified_base 11: mod_base = OTHER; note = 2'O-methyl cytidine
  modified_base 12: mod_base = OTHER; note = 2'-fluoro adenosine
  modified_base 13: mod_base = OTHER; note = 2'O-methyl uridine
  modified_base 14: mod_base = OTHER; note = 2'-fluoro adenosine
  modified_base 15: mod_base = OTHER; note = 2'O-methyl guanosine
  modified_base 16: mod_base = OTHER; note = 2'-fluoro adenosine
  modified_base 17: mod_base = OTHER; note = 2'O-methyl adenosine
  modified_base 18: mod_base = OTHER; note = 2'-fluoro guanosine
  modified_base 19: mod_base = OTHER; note = 2'O-methyl guanosine phosphorothioate
  modified_base 20: mod_base = OTHER; note = 2'O-methyl uridine phosphorothioate
  modified_base 21: mod_base = OTHER; note = 2'O-methyl uridine
tcgtactccccatagaaggtt

SEQ ID NO: 1647 - RNA, 21 nt, synthetic construct
  source 1..21: mol_type = other RNA
  modified_base 1: mod_base = OTHER; note = 2'O-methyl uridine phosphorothioate
  modified_base 2: mod_base = OTHER; note = 2'-fluoro guanosine phosphorothioate
  modified_base 3: mod_base = OTHER; note = 2'O-methyl uridine
  modified_base 4: mod_base = OTHER; note = 2'-fluoro cytidine
  modified_base 5: mod_base = OTHER; note = 2'O-methyl guanosine
  modified_base 6: mod_base = OTHER; note = 2'-fluoro uridine
  modified_base 7: mod_base = OTHER; note = 2'O-methyl adenosine
  modified_base 8: mod_base = OTHER; note = 2'-fluoro cytidine
  modified_base 9: mod_base = OTHER; note = 2'O-methyl uridine
  modified_base 10: mod_base = OTHER; note = 2'-fluoro cytidine
  modified_base 11: mod_base = OTHER; note = 2'O-methyl cytidine
  modified_base 12: mod_base = OTHER; note = 2'-fluoro cytidine
  modified_base 13: mod_base = OTHER; note = 2'O-methyl cytidine
  modified_base 14: mod_base = OTHER; note = 2'-fluoro adenosine
  modified_base 15: mod_base = OTHER; note = 2'O-methyl uridine
  modified_base 16: mod_base = OTHER; note = 2'-fluoro adenosine
  modified_base 17: mod_base = OTHER; note = 2'O-methyl guanosine
  modified_base 18: mod_base = OTHER; note = 2'-fluoro adenosine
  modified_base 19: mod_base = OTHER; note = 2'O-methyl adenosine phosphorothioate
  modified_base 20: mod_base = OTHER; note = 2'O-methyl uridine phosphorothioate
  modified_base 21: mod_base = OTHER; note = 2'O-methyl uridine
tgtcgtactccccatagaatt

SEQ ID NO: 1648 - RNA, 21 nt, synthetic construct
  source 1..21: mol_type = other RNA
  modified_base 1: mod_base = OTHER; note = 2'O-methyl adenosine phosphorothioate
  modified_base 2: mod_base = OTHER; note = 2'-fluoro uridine phosphorothioate
  modified_base 3: mod_base = OTHER; note = 2'O-methyl guanosine
  modified_base 4: mod_base = OTHER; note = 2'-fluoro uridine
  modified_base 5: mod_base = OTHER; note = 2'O-methyl cytidine
  modified_base 6: mod_base = OTHER; note = 2'-fluoro guanosine
  modified_base 7: mod_base = OTHER; note = 2'O-methyl uridine
  modified_base 8: mod_base = OTHER; note = 2'-fluoro adenosine
  modified_base 9: mod_base = OTHER; note = 2'O-methyl cytidine
  modified_base 10: mod_base = OTHER; note = 2'-fluoro uridine
  modified_base 11: mod_base = OTHER; note = 2'O-methyl cytidine
  modified_base 12: mod_base = OTHER; note = 2'-fluoro cytidine
  modified_base 13: mod_base = OTHER; note = 2'O-methyl cytidine
  modified_base 14: mod_base = OTHER; note = 2'-fluoro cytidine
  modified_base 15: mod_base = OTHER; note = 2'O-methyl adenosine
  modified_base 16: mod_base = OTHER; note = 2'-fluoro uridine
  modified_base 17: mod_base = OTHER; note = 2'O-methyl adenosine
  modified_base 18: mod_base = OTHER; note = 2'-fluoro guanosine
  modified_base 19: mod_base = OTHER; note = 2'O-methyl adenosine phosphorothioate
  modified_base 20: mod_base = OTHER; note = 2'O-methyl uridine phosphorothioate
  modified_base 21: mod_base = OTHER; note = 2'O-methyl uridine
atgtcgtactccccatagatt

SEQ ID NO: 1649 - RNA, 21 nt, synthetic construct
  source 1..21: mol_type = other RNA
  modified_base 1: mod_base = OTHER; note = 2'O-methyl guanosine phosphorothioate
  modified_base 2: mod_base = OTHER; note = 2'-fluoro adenosine phosphorothioate
  modified_base 3: mod_base = OTHER; note = 2'O-methyl uridine
  modified_base 4: mod_base = OTHER; note = 2'-fluoro guanosine
  modified_base 5: mod_base = OTHER; note = 2'O-methyl uridine
  modified_base 6: mod_base = OTHER; note = 2'-fluoro cytidine
  modified_base 7: mod_base = OTHER; note = 2'O-methyl guanosine
  modified_base 8: mod_base = OTHER; note = 2'-fluoro uridine
  modified_base 9: mod_base = OTHER; note = 2'O-methyl adenosine
  modified_base 10: mod_base = OTHER; note = 2'-fluoro cytidine
  modified_base 11: mod_base = OTHER; note = 2'O-methyl uridine
  modified_base 12: mod_base = OTHER; note = 2'-fluoro cytidine
  modified_base 13: mod_base = OTHER; note = 2'O-methyl cytidine
  modified_base 14: mod_base = OTHER; note = 2'-fluoro cytidine
  modified_base 15: mod_base = OTHER; note = 2'O-methyl cytidine
  modified_base 16: mod_base = OTHER; note = 2'-fluoro adenosine
  modified_base 17: mod_base = OTHER; note = 2'O-methyl uridine
  modified_base 18: mod_base = OTHER; note = 2'-fluoro adenosine
  modified_base 19: mod_base = OTHER; note = 2'O-methyl guanosine phosphorothioate
  modified_base 20: mod_base = OTHER; note = 2'O-methyl uridine phosphorothioate
  modified_base 21: mod_base = OTHER; note = 2'O-methyl uridine
gatgtcgtactccccatagtt

SEQ ID NO: 1650 - RNA, 21 nt, synthetic construct
  source 1..21: mol_type = other RNA
  modified_base 1: mod_base = OTHER; note = 2'O-methyl adenosine phosphorothioate
  modified_base 2: mod_base = OTHER; note = 2'-fluoro guanosine phosphorothioate
  modified_base 3: mod_base = OTHER; note = 2'O-methyl adenosine
  modified_base 4: mod_base = OTHER; note = 2'-fluoro uridine
  modified_base 5: mod_base = OTHER; note = 2'O-methyl guanosine
  modified_base 6: mod_base = OTHER; note = 2'-fluoro uridine
  modified_base 7: mod_base = OTHER; note = 2'O-methyl cytidine
  modified_base 8: mod_base = OTHER; note = 2'-fluoro guanosine
  modified_base 9: mod_base = OTHER; note = 2'O-methyl uridine
  modified_base 10: mod_base = OTHER; note = 2'-fluoro adenosine
  modified_base 11: mod_base = OTHER; note = 2'O-methyl cytidine
  modified_base 12: mod_base = OTHER; note = 2'-fluoro uridine
  modified_base 13: mod_base = OTHER; note = 2'O-methyl cytidine
  modified_base 14: mod_base = OTHER; note = 2'-fluoro cytidine
  modified_base 15: mod_base = OTHER; note = 2'O-methyl cytidine
  modified_base 16: mod_base = OTHER; note = 2'-fluoro cytidine
  modified_base 17: mod_base = OTHER; note = 2'O-methyl adenosine
  modified_base 18: mod_base = OTHER; note = 2'-fluoro uridine
  modified_base 19: mod_base = OTHER; note = 2'O-methyl adenosine phosphorothioate
  modified_base 20: mod_base = OTHER; note = 2'O-methyl uridine phosphorothioate
  modified_base 21: mod_base = OTHER; note = 2'O-methyl uridine
agatgtcgtactccccatatt

SEQ ID NO: 1651 - RNA, 21 nt, synthetic construct
  source 1..21: mol_type = other RNA
  modified_base 1: mod_base = OTHER; note = 2'O-methyl cytidine phosphorothioate
  modified_base 2: mod_base = OTHER; note = 2'-fluoro uridine phosphorothioate
  modified_base 3: mod_base = OTHER; note = 2'O-methyl uridine
  modified_base 4: mod_base = OTHER; note = 2'-fluoro uridine
  modified_base 5: mod_base = OTHER; note = 2'O-methyl adenosine
  modified_base 6: mod_base = OTHER; note = 2'-fluoro guanosine
  modified_base 7: mod_base = OTHER; note = 2'O-methyl guanosine
  modified_base 8: mod_base = OTHER; note = 2'-fluoro guanosine
  modified_base 9: mod_base = OTHER; note = 2'O-methyl cytidine
  modified_base 10: mod_base = OTHER; note = 2'-fluoro adenosine
  modified_base 11: mod_base = OTHER; note = 2'O-methyl guanosine
  modified_base 12: mod_base = OTHER; note = 2'-fluoro adenosine
  modified_base 13: mod_base = OTHER; note = 2'O-methyl uridine
  modified_base 14: mod_base = OTHER; note = 2'-fluoro guanosine
  modified_base 15: mod_base = OTHER; note = 2'O-methyl uridine
  modified_base 16: mod_base = OTHER; note = 2'-fluoro cytidine
  modified_base 17: mod_base = OTHER; note = 2'O-methyl guanosine
  modified_base 18: mod_base = OTHER; note = 2'-fluoro uridine
  modified_base 19: mod_base = OTHER; note = 2'O-methyl adenosine phosphorothioate
  modified_base 20: mod_base = OTHER; note = 2'O-methyl uridine phosphorothioate
  modified_base 21: mod_base = OTHER; note = 2'O-methyl uridine
ctttagggcagatgtcgtatt

SEQ ID NO: 1652 - RNA, 21 nt, synthetic construct
  source 1..21: mol_type = other RNA
  modified_base 1: mod_base = OTHER; note = 2'O-methyl adenosine phosphorothioate
  modified_base 2: mod_base = OTHER; note = 2'-fluoro cytidine phosphorothioate
  modified_base 3: mod_base = OTHER; note = 2'O-methyl uridine
  modified_base 4: mod_base = OTHER; note = 2'-fluoro uridine
  modified_base 5: mod_base = OTHER; note = 2'O-methyl uridine
  modified_base 6: mod_base = OTHER; note = 2'-fluoro adenosine
  modified_base 7: mod_base = OTHER; note = 2'O-methyl guanosine
  modified_base 8: mod_base = OTHER; note = 2'-fluoro guanosine
  modified_base 9: mod_base = OTHER; note = 2'O-methyl guanosine
  modified_base 10: mod_base = OTHER; note = 2'-fluoro cytidine
  modified_base 11: mod_base = OTHER; note = 2'O-methyl adenosine
  modified_base 12: mod_base = OTHER; note = 2'-fluoro guanosine
  modified_base 13: mod_base = OTHER; note = 2'O-methyl adenosine
  modified_base 14: mod_base = OTHER; note = 2'-fluoro uridine
  modified_base 15: mod_base = OTHER; note = 2'O-methyl guanosine
  modified_base 16: mod_base = OTHER; note = 2'-fluoro uridine
  modified_base 17: mod_base = OTHER; note = 2'O-methyl cytidine
  modified_base 18: mod_base = OTHER; note = 2'-fluoro guanosine
  modified_base 19: mod_base = OTHER; note = 2'O-methyl uridine phosphorothioate
  modified_base 20: mod_base = OTHER; note = 2'O-methyl uridine phosphorothioate
  modified_base 21: mod_base = OTHER; note = 2'O-methyl uridine
actttagggcagatgtcgttt

SEQ ID NO: 1653 - RNA, 21 nt, synthetic construct
  source 1..21: mol_type = other RNA
  modified_base 1: mod_base = OTHER; note = 2'O-methyl guanosine phosphorothioate
  modified_base 2: mod_base = OTHER; note = 2'-fluoro adenosine phosphorothioate
  modified_base 3: mod_base = OTHER; note = 2'O-methyl cytidine
  modified_base 4: mod_base = OTHER; note = 2'-fluoro uridine
  modified_base 5: mod_base = OTHER; note = 2'O-methyl uridine
  modified_base 6: mod_base = OTHER; note = 2'-fluoro uridine
  modified_base 7: mod_base = OTHER; note = 2'O-methyl adenosine
  modified_base 8: mod_base = OTHER; note = 2'-fluoro guanosine
  modified_base 9: mod_base = OTHER; note = 2'O-methyl guanosine
  modified_base 10: mod_base = OTHER; note = 2'-fluoro guanosine
  modified_base 11: mod_base = OTHER; note = 2'O-methyl cytidine
  modified_base 12: mod_base = OTHER; note = 2'-fluoro adenosine
  modified_base 13: mod_base = OTHER; note = 2'O-methyl guanosine
  modified_base 14: mod_base = OTHER; note = 2'-fluoro adenosine
  modified_base 15: mod_base = OTHER; note = 2'O-methyl uridine
  modified_base 16: mod_base = OTHER; note = 2'-fluoro guanosine
  modified_base 17: mod_base = OTHER; note = 2'O-methyl uridine
  modified_base 18: mod_base = OTHER; note = 2'-fluoro cytidine
  modified_base 19: mod_base = OTHER; note = 2'O-methyl guanosine phosphorothioate
  modified_base 20: mod_base = OTHER; note = 2'O-methyl uridine phosphorothioate
  modified_base 21: mod_base = OTHER; note = 2'O-methyl uridine
gactttagggcagatgtcgtt

SEQ ID NO: 1654 - RNA, 21 nt, synthetic construct
  source 1..21: mol_type = other RNA
  modified_base 1: mod_base = OTHER; note = 2'O-methyl uridine phosphorothioate
  modified_base 2: mod_base = OTHER; note = 2'-fluoro guanosine phosphorothioate
  modified_base 3: mod_base = OTHER; note = 2'O-methyl adenosine
  modified_base 4: mod_base = OTHER; note = 2'-fluoro cytidine
  modified_base 5: mod_base = OTHER; note = 2'O-methyl uridine
  modified_base 6: mod_base = OTHER; note = 2'-fluoro uridine
  modified_base 7: mod_base = OTHER; note = 2'O-methyl uridine
  modified_base 8: mod_base = OTHER; note = 2'-fluoro adenosine
  modified_base 9: mod_base = OTHER; note = 2'O-methyl guanosine
  modified_base 10: mod_base = OTHER; note = 2'-fluoro guanosine
  modified_base 11: mod_base = OTHER; note = 2'O-methyl guanosine
  modified_base 12: mod_base = OTHER; note = 2'-fluoro cytidine
  modified_base 13: mod_base = OTHER; note = 2'O-methyl adenosine
  modified_base 14: mod_base = OTHER; note = 2'-fluoro guanosine
  modified_base 15: mod_base = OTHER; note = 2'O-methyl adenosine
  modified_base 16: mod_base = OTHER; note = 2'-fluoro uridine
  modified_base 17: mod_base = OTHER; note = 2'O-methyl guanosine
  modified_base 18: mod_base = OTHER; note = 2'-fluoro uridine
  modified_base 19: mod_base = OTHER; note = 2'O-methyl cytidine phosphorothioate
  modified_base 20: mod_base = OTHER; note = 2'O-methyl uridine phosphorothioate
  modified_base 21: mod_base = OTHER; note = 2'O-methyl uridine
tgactttagggcagatgtctt

SEQ ID NO: 1655 - RNA, 21 nt, synthetic construct
  source 1..21: mol_type = other RNA
  modified_base 1: mod_base = OTHER; note = 2'O-methyl uridine phosphorothioate
  modified_base 2: mod_base = OTHER; note = 2'-fluoro uridine phosphorothioate
  modified_base 3: mod_base = OTHER; note = 2'O-methyl guanosine
  modified_base 4: mod_base = OTHER; note = 2'-fluoro adenosine
  modified_base 5: mod_base = OTHER; note = 2'O-methyl cytidine
  modified_base 6: mod_base = OTHER; note = 2'-fluoro uridine
  modified_base 7: mod_base = OTHER; note = 2'O-methyl uridine
  modified_base 8: mod_base = OTHER; note = 2'-fluoro uridine
  modified_base 9: mod_base = OTHER; note = 2'O-methyl adenosine
  modified_base 10: mod_base = OTHER; note = 2'-fluoro guanosine
  modified_base 11: mod_base = OTHER; note = 2'O-methyl guanosine
  modified_base 12: mod_base = OTHER; note = 2'-fluoro guanosine
  modified_base 13: mod_base = OTHER; note = 2'O-methyl cytidine
  modified_base 14: mod_base = OTHER; note = 2'-fluoro adenosine
  modified_base 15: mod_base = OTHER; note = 2'O-methyl guanosine
  modified_base 16: mod_base = OTHER; note = 2'-fluoro adenosine
  modified_base 17: mod_base = OTHER; note = 2'O-methyl uridine
  modified_base 18: mod_base = OTHER; note = 2'-fluoro guanosine
  modified_base 19: mod_base = OTHER; note = 2'O-methyl uridine phosphorothioate
  modified_base 20: mod_base = OTHER; note = 2'O-methyl uridine phosphorothioate
  modified_base 21: mod_base = OTHER; note = 2'O-methyl uridine
ttgactttagggcagatgttt

SEQ ID NO: 1656 - RNA, 21 nt, synthetic construct
  source 1..21: mol_type = other RNA
  modified_base 1: mod_base = OTHER; note = 2'O-methyl cytidine phosphorothioate
  modified_base 2: mod_base = OTHER; note = 2'-fluoro uridine phosphorothioate
  modified_base 3: mod_base = OTHER; note = 2'O-methyl uridine
  modified_base 4: mod_base = OTHER; note = 2'-fluoro guanosine
  modified_base 5: mod_base = OTHER; note = 2'O-methyl adenosine
  modified_base 6: mod_base = OTHER; note = 2'-fluoro cytidine
  modified_base 7: mod_base = OTHER; note = 2'O-methyl uridine
  modified_base 8: mod_base = OTHER; note = 2'-fluoro uridine
  modified_base 9: mod_base = OTHER; note = 2'O-methyl uridine
  modified_base 10: mod_base = OTHER; note = 2'-fluoro adenosine
  modified_base 11: mod_base = OTHER; note = 2'O-methyl guanosine
  modified_base 12: mod_base = OTHER; note = 2'-fluoro guanosine
  modified_base 13: mod_base = OTHER; note = 2'O-methyl guanosine
  modified_base 14: mod_base = OTHER; note = 2'-fluoro cytidine
  modified_base 15: mod_base = OTHER; note = 2'O-methyl adenosine
  modified_base 16: mod_base = OTHER; note = 2'-fluoro guanosine
  modified_base 17: mod_base = OTHER; note = 2'O-methyl adenosine
  modified_base 18: mod_base = OTHER; note = 2'-fluoro uridine
  modified_base 19: mod_base = OTHER; note = 2'O-methyl guanosine phosphorothioate
  modified_base 20: mod_base = OTHER; note = 2'O-methyl uridine phosphorothioate
  modified_base 21: mod_base = OTHER; note = 2'O-methyl uridine
cttgactttagggcagatgtt

SEQ ID NO: 1657 - RNA, 21 nt, synthetic construct
  source 1..21: mol_type = other RNA
  modified_base 1: mod_base = OTHER; note = 2'O-methyl adenosine phosphorothioate
  modified_base 2: mod_base = OTHER; note = 2'-fluoro cytidine phosphorothioate
  modified_base 3: mod_base = OTHER; note = 2'O-methyl uridine
  modified_base 4: mod_base = OTHER; note = 2'-fluoro uridine
  modified_base 5: mod_base = OTHER; note = 2'O-methyl guanosine
  modified_base 6: mod_base = OTHER; note = 2'-fluoro adenosine
  modified_base 7: mod_base = OTHER; note = 2'O-methyl cytidine
  modified_base 8: mod_base = OTHER; note = 2'-fluoro uridine
  modified_base 9: mod_base = OTHER; note = 2'O-methyl uridine
  modified_base 10: mod_base = OTHER; note = 2'-fluoro uridine
  modified_base 11: mod_base = OTHER; note = 2'O-methyl adenosine
  modified_base 12: mod_base = OTHER; note = 2'-fluoro guanosine
  modified_base 13: mod_base = OTHER; note = 2'O-methyl guanosine
  modified_base 14: mod_base = OTHER; note = 2'-fluoro guanosine
  modified_base 15: mod_base = OTHER; note = 2'O-methyl cytidine
  modified_base 16: mod_base = OTHER; note = 2'-fluoro adenosine
  modified_base 17: mod_base = OTHER; note = 2'O-methyl guanosine
  modified_base 18: mod_base = OTHER; note = 2'-fluoro adenosine
  modified_base 19: mod_base = OTHER; note = 2'O-methyl uridine phosphorothioate
  modified_base 20: mod_base = OTHER; note = 2'O-methyl uridine phosphorothioate
  modified_base 21: mod_base = OTHER; note = 2'O-methyl uridine
acttgactttagggcagattt

SEQ ID NO: 1658 - RNA, 21 nt, synthetic construct
  source 1..21: mol_type = other RNA
  modified_base 1: mod_base = OTHER; note = 2'O-methyl cytidine phosphorothioate
  modified_base 2: mod_base = OTHER; note = 2'-fluoro guanosine phosphorothioate
  modified_base 3: mod_base = OTHER; note = 2'O-methyl uridine
  modified_base 4: mod_base = OTHER; note = 2'-fluoro guanosine
  modified_base 5: mod_base = OTHER; note = 2'O-methyl guanosine
  modified_base 6: mod_base = OTHER; note = 2'-fluoro adenosine
  modified_base 7: mod_base = OTHER; note = 2'O-methyl cytidine
  modified_base 8: mod_base = OTHER; note = 2'-fluoro uridine
  modified_base 9: mod_base = OTHER; note = 2'O-methyl uridine
  modified_base 10: mod_base = OTHER; note = 2'-fluoro guanosine
  modified_base 11: mod_base = OTHER; note = 2'O-methyl adenosine
  modified_base 12: mod_base = OTHER; note = 2'-fluoro cytidine
  modified_base 13: mod_base = OTHER; note = 2'O-methyl uridine
  modified_base 14: mod_base = OTHER; note = 2'-fluoro uridine
  modified_base 15: mod_base = OTHER; note = 2'O-methyl uridine
  modified_base 16: mod_base = OTHER; note = 2'-fluoro adenosine
  modified_base 17: mod_base = OTHER; note = 2'O-methyl guanosine
  modified_base 18: mod_base = OTHER; note = 2'-fluoro guanosine
  modified_base 19: mod_base = OTHER; note = 2'O-methyl guanosine phosphorothioate
  modified_base 20: mod_base = OTHER; note = 2'O-methyl uridine phosphorothioate
  modified_base 21: mod_base = OTHER; note = 2'O-methyl uridine
cgtggacttgactttagggtt

SEQ ID NO: 1659 - RNA, 21 nt, synthetic construct
  source 1..21: mol_type = other RNA
  modified_base 1: mod_base = OTHER; note = 2'O-methyl uridine phosphorothioate
  modified_base 2: mod_base = OTHER; note = 2'-fluoro cytidine phosphorothioate
  modified_base 3: mod_base = OTHER; note = 2'O-methyl guanosine
  modified_base 4: mod_base = OTHER; note = 2'-fluoro uridine
  modified_base 5: mod_base = OTHER; note = 2'O-methyl guanosine
  modified_base 6: mod_base = OTHER; note = 2'-fluoro guanosine
  modified_base 7: mod_base = OTHER; note = 2'O-methyl adenosine
  modified_base 8: mod_base = OTHER; note = 2'-fluoro cytidine
  modified_base 9: mod_base = OTHER; note = 2'O-methyl uridine
  modified_base 10: mod_base = OTHER; note = 2'-fluoro uridine
  modified_base 11: mod_base = OTHER; note = 2'O-methyl guanosine
  modified_base 12: mod_base = OTHER; note = 2'-fluoro adenosine
  modified_base 13: mod_base = OTHER; note = 2'O-methyl cytidine
  modified_base 14: mod_base = OTHER; note = 2'-fluoro uridine
  modified_base 15: mod_base = OTHER; note = 2'O-methyl uridine
  modified_base 16: mod_base = OTHER; note = 2'-fluoro uridine
  modified_base 17: mod_base = OTHER; note = 2'O-methyl adenosine
  modified_base 18: mod_base = OTHER; note = 2'-fluoro guanosine
  modified_base 19: mod_base = OTHER; note = 2'O-methyl guanosine phosphorothioate
  modified_base 20: mod_base = OTHER; note = 2'O-methyl uridine phosphorothioate
  modified_base 21: mod_base = OTHER; note = 2'O-methyl uridine
tcgtggacttgactttaggtt

SEQ ID NO: 1660 - RNA, 21 nt, synthetic construct
  source 1..21: mol_type = other RNA
  modified_base 1: mod_base = OTHER; note = 2'O-methyl guanosine phosphorothioate
  modified_base 2: mod_base = OTHER; note = 2'-fluoro uridine phosphorothioate
  modified_base 3: mod_base = OTHER; note = 2'O-methyl uridine
  modified_base 4: mod_base = OTHER; note = 2'-fluoro cytidine
  modified_base 5: mod_base = OTHER; note = 2'O-methyl guanosine
  modified_base 6: mod_base = OTHER; note = 2'-fluoro uridine
  modified_base 7: mod_base = OTHER; note = 2'O-methyl guanosine
  modified_base 8: mod_base = OTHER; note = 2'-fluoro guanosine
  modified_base 9: mod_base = OTHER; note = 2'O-methyl adenosine
  modified_base 10: mod_base = OTHER; note = 2'-fluoro cytidine
  modified_base 11: mod_base = OTHER; note = 2'O-methyl uridine
  modified_base 12: mod_base = OTHER; note = 2'-fluoro uridine
  modified_base 13: mod_base = OTHER; note = 2'O-methyl guanosine
  modified_base 14: mod_base = OTHER; note = 2'-fluoro adenosine
  modified_base 15: mod_base = OTHER; note = 2'O-methyl cytidine
  modified_base 16: mod_base = OTHER; note = 2'-fluoro uridine
  modified_base 17: mod_base = OTHER; note = 2'O-methyl uridine
  modified_base 18: mod_base = OTHER; note = 2'-fluoro uridine
  modified_base 19: mod_base = OTHER; note = 2'O-methyl adenosine phosphorothioate
  modified_base 20: mod_base = OTHER; note = 2'O-methyl uridine phosphorothioate
  modified_base 21: mod_base = OTHER; note = 2'O-methyl uridine
gttcgtggacttgactttatt

SEQ ID NO: 1661 - RNA, 21 nt, synthetic construct
  source 1..21: mol_type = other RNA
  modified_base 1: mod_base = OTHER; note = 2'O-methyl adenosine phosphorothioate
  modified_base 2: mod_base = OTHER; note = 2'-fluoro guanosine phosphorothioate
  modified_base 3: mod_base = OTHER; note = 2'O-methyl uridine
  modified_base 4: mod_base = OTHER; note = 2'-fluoro uridine
  modified_base 5: mod_base = OTHER; note = 2'O-methyl cytidine
  modified_base 6: mod_base = OTHER; note = 2'-fluoro guanosine
  modified_base 7: mod_base = OTHER; note = 2'O-methyl uridine
  modified_base 8: mod_base = OTHER; note = 2'-fluoro guanosine
  modified_base 9: mod_base = OTHER; note = 2'O-methyl guanosine
  modified_base 10: mod_base = OTHER; note = 2'-fluoro adenosine
  modified_base 11: mod_base = OTHER; note = 2'O-methyl cytidine
  modified_base 12: mod_base = OTHER; note = 2'-fluoro uridine
  modified_base 13: mod_base = OTHER; note = 2'O-methyl uridine
  modified_base 14: mod_base = OTHER; note = 2'-fluoro guanosine
  modified_base 15: mod_base = OTHER; note = 2'O-methyl adenosine
  modified_base 16: mod_base = OTHER; note = 2'-fluoro cytidine
  modified_base 17: mod_base = OTHER; note = 2'O-methyl uridine
  modified_base 18: mod_base = OTHER; note = 2'-fluoro uridine
  modified_base 19: mod_base = OTHER; note = 2'O-methyl uridine phosphorothioate
  modified_base 20: mod_base = OTHER; note = 2'O-methyl uridine phosphorothioate
  modified_base 21: mod_base = OTHER; note = 2'O-methyl uridine
agttcgtggacttgacttttt

SEQ ID NO: 1662 - RNA, 21 nt, synthetic construct
  source 1..21: mol_type = other RNA
  modified_base 1: mod_base = OTHER; note = 2'O-methyl adenosine phosphorothioate
  modified_base 2: mod_base = OTHER; note = 2'-fluoro adenosine phosphorothioate
  modified_base 3: mod_base = OTHER; note = 2'O-methyl guanosine
  modified_base 4: mod_base = OTHER; note = 2'-fluoro uridine
  modified_base 5: mod_base = OTHER; note = 2'O-methyl uridine
  modified_base 6: mod_base = OTHER; note = 2'-fluoro cytidine
  modified_base 7: mod_base = OTHER; note = 2'O-methyl guanosine
  modified_base 8: mod_base = OTHER; note = 2'-fluoro uridine
  modified_base 9: mod_base = OTHER; note = 2'O-methyl guanosine
  modified_base 10: mod_base = OTHER; note = 2'-fluoro guanosine
  modified_base 11: mod_base = OTHER; note = 2'O-methyl adenosine
  modified_base 12: mod_base = OTHER; note = 2'-fluoro cytidine
  modified_base 13: mod_base = OTHER; note = 2'O-methyl uridine
  modified_base 14: mod_base = OTHER; note = 2'-fluoro uridine
  modified_base 15: mod_base = OTHER; note = 2'O-methyl guanosine
  modified_base 16: mod_base = OTHER; note = 2'-fluoro adenosine
  modified_base 17: mod_base = OTHER; note = 2'O-methyl cytidine
  modified_base 18: mod_base = OTHER; note = 2'-fluoro uridine
  modified_base 19: mod_base = OTHER; note = 2'O-methyl uridine phosphorothioate
  modified_base 20: mod_base = OTHER; note = 2'O-methyl uridine phosphorothioate
  modified_base 21: mod_base = OTHER; note = 2'O-methyl uridine
aagttcgtggacttgactttt

SEQ ID NO: 1663 - RNA, 21 nt, synthetic construct
  source 1..21: mol_type = other RNA
  modified_base 1: mod_base = OTHER; note = 2'O-methyl adenosine phosphorothioate
  modified_base 2: mod_base = OTHER; note = 2'-fluoro adenosine phosphorothioate
  modified_base 3: mod_base = OTHER; note = 2'O-methyl adenosine
  modified_base 4: mod_base = OTHER; note = 2'-fluoro guanosine
  modified_base 5: mod_base = OTHER; note = 2'O-methyl uridine
  modified_base 6: mod_base = OTHER; note = 2'-fluoro uridine
  modified_base 7: mod_base = OTHER; note = 2'O-methyl cytidine
  modified_base 8: mod_base = OTHER; note = 2'-fluoro guanosine
  modified_base 9: mod_base = OTHER; note = 2'O-methyl uridine
  modified_base 10: mod_base = OTHER; note = 2'-fluoro guanosine
  modified_base 11: mod_base = OTHER; note = 2'O-methyl guanosine
  modified_base 12: mod_base = OTHER; note = 2'-fluoro adenosine
  modified_base 13: mod_base = OTHER; note = 2'O-methyl cytidine
  modified_base 14: mod_base = OTHER; note = 2'-fluoro uridine
  modified_base 15: mod_base = OTHER; note = 2'O-methyl uridine
  modified_base 16: mod_base = OTHER; note = 2'-fluoro guanosine
  modified_base 17: mod_base = OTHER; note = 2'O-methyl adenosine
  modified_base 18: mod_base = OTHER; note = 2'-fluoro cytidine
  modified_base 19: mod_base = OTHER; note = 2'O-methyl uridine phosphorothioate
  modified_base 20: mod_base = OTHER; note = 2'O-methyl uridine phosphorothioate
  modified_base 21: mod_base = OTHER; note = 2'O-methyl uridine
aaagttcgtggacttgacttt

SEQ ID NO: 1664 - RNA, 21 nt, synthetic construct
  source 1..21: mol_type = other RNA
  modified_base 1: mod_base = OTHER; note = 2'O-methyl guanosine phosphorothioate
  modified_base 2: mod_base = OTHER; note = 2'-fluoro adenosine phosphorothioate
  modified_base 3: mod_base = OTHER; note = 2'O-methyl adenosine
  modified_base 4: mod_base = OTHER; note = 2'-fluoro adenosine
  modified_base 5: mod_base = OTHER; note = 2'O-methyl guanosine
  modified_base 6: mod_base = OTHER; note = 2'-fluoro uridine
  modified_base 7: mod_base = OTHER; note = 2'O-methyl uridine
  modified_base 8: mod_base = OTHER; note = 2'-fluoro cytidine
  modified_base 9: mod_base = OTHER; note = 2'O-methyl guanosine
  modified_base 10: mod_base = OTHER; note = 2'-fluoro uridine
  modified_base 11: mod_base = OTHER; note = 2'O-methyl guanosine
  modified_base 12: mod_base = OTHER; note = 2'-fluoro guanosine
  modified_base 13: mod_base = OTHER; note = 2'O-methyl adenosine
  modified_base 14: mod_base = OTHER; note = 2'-fluoro cytidine
  modified_base 15: mod_base = OTHER; note = 2'O-methyl uridine
  modified_base 16: mod_base = OTHER; note = 2'-fluoro uridine
  modified_base 17: mod_base = OTHER; note = 2'O-methyl guanosine
  modified_base 18: mod_base = OTHER; note = 2'-fluoro adenosine
  modified_base 19: mod_base = OTHER; note = 2'O-methyl cytidine phosphorothioate
  modified_base 20: mod_base = OTHER; note = 2'O-methyl uridine phosphorothioate
  modified_base 21: mod_base = OTHER; note = 2'O-methyl uridine
gaaagttcgtggacttgactt

SEQ ID NO: 1665 - RNA, 21 nt, synthetic construct
  source 1..21: mol_type = other RNA
  modified_base 1: mod_base = OTHER; note = 2'O-methyl adenosine phosphorothioate
  modified_base 2: mod_base = OTHER; note = 2'-fluoro guanosine phosphorothioate
  modified_base 3: mod_base = OTHER; note = 2'O-methyl adenosine
  modified_base 4: mod_base = OTHER; note = 2'-fluoro adenosine
  modified_base 5: mod_base = OTHER; note = 2'O-methyl adenosine
  modified_base 6: mod_base = OTHER; note = 2'-fluoro guanosine
  modified_base 7: mod_base = OTHER; note = 2'O-methyl uridine
  modified_base 8: mod_base = OTHER; note = 2'-fluoro uridine
  modified_base 9: mod_base = OTHER; note = 2'O-methyl cytidine
  modified_base 10: mod_base = OTHER; note = 2'-fluoro guanosine
  modified_base 11: mod_base = OTHER; note = 2'O-methyl uridine
  modified_base 12: mod_base = OTHER; note = 2'-fluoro guanosine
  modified_base 13: mod_base = OTHER; note = 2'O-methyl guanosine
  modified_base 14: mod_base = OTHER; note = 2'-fluoro adenosine
  modified_base 15: mod_base = OTHER; note = 2'O-methyl cytidine
  modified_base 16: mod_base = OTHER; note = 2'-fluoro uridine
  modified_base 17: mod_base = OTHER; note = 2'O-methyl uridine
  modified_base 18: mod_base = OTHER; note = 2'-fluoro guanosine
  modified_base 19: mod_base = OTHER; note = 2'O-methyl adenosine phosphorothioate
  modified_base 20: mod_base = OTHER; note = 2'O-methyl uridine phosphorothioate
  modified_base 21: mod_base = OTHER; note = 2'O-methyl uridine
agaaagttcgtggacttgatt

SEQ ID NO: 1666 - RNA, 21 nt, synthetic construct
  source 1..21: mol_type = other RNA
  modified_base 1: mod_base = OTHER; note = 2'O-methyl adenosine phosphorothioate
  modified_base 2: mod_base = OTHER; note = 2'-fluoro adenosine phosphorothioate
  modified_base 3: mod_base = OTHER; note = 2'O-methyl guanosine
  modified_base 4: mod_base = OTHER; note = 2'-fluoro adenosine
  modified_base 5: mod_base = OTHER; note = 2'O-methyl adenosine
  modified_base 6: mod_base = OTHER; note = 2'-fluoro adenosine
  modified_base 7: mod_base = OTHER; note = 2'O-methyl guanosine
  modified_base 8: mod_base = OTHER; note = 2'-fluoro uridine
  modified_base 9: mod_base = OTHER; note = 2'O-methyl uridine
  modified_base 10: mod_base = OTHER; note = 2'-fluoro cytidine
  modified_base 11: mod_base = OTHER; note = 2'O-methyl guanosine
  modified_base 12: mod_base = OTHER; note = 2'-fluoro uridine
  modified_base 13: mod_base = OTHER; note = 2'O-methyl guanosine
  modified_base 14: mod_base = OTHER; note = 2'-fluoro guanosine
  modified_base 15: mod_base = OTHER; note = 2'O-methyl adenosine
  modified_base 16: mod_base = OTHER; note = 2'-fluoro cytidine
  modified_base 17: mod_base = OTHER; note = 2'O-methyl uridine
  modified_base 18: mod_base = OTHER; note = 2'-fluoro uridine
  modified_base 19: mod_base = OTHER; note = 2'O-methyl guanosine phosphorothioate
  modified_base 20: mod_base = OTHER; note = 2'O-methyl uridine phosphorothioate
  modified_base 21: mod_base = OTHER; note = 2'O-methyl uridine
aagaaagttcgtggacttgtt

SEQ ID NO: 1667 - RNA, 21 nt, synthetic construct
  source 1..21: mol_type = other RNA
  modified_base 1: mod_base = OTHER; note = 2'O-methyl guanosine phosphorothioate
  modified_base 2: mod_base = OTHER; note = 2'-fluoro adenosine phosphorothioate
  modified_base 3: mod_base = OTHER; note = 2'O-methyl adenosine
  modified_base 4: mod_base = OTHER; note = 2'-fluoro guanosine
  modified_base 5: mod_base = OTHER; note = 2'O-methyl adenosine
  modified_base 6: mod_base = OTHER; note = 2'-fluoro adenosine
  modified_base 7: mod_base = OTHER; note = 2'O-methyl adenosine
  modified_base 8: mod_base = OTHER; note = 2'-fluoro guanosine
  modified_base 9: mod_base = OTHER; note = 2'O-methyl uridine
  modified_base 10: mod_base = OTHER; note = 2'-fluoro uridine
  modified_base 11: mod_base = OTHER; note = 2'O-methyl cytidine
  modified_base 12: mod_base = OTHER; note = 2'-fluoro guanosine
  modified_base 13: mod_base = OTHER; note = 2'O-methyl uridine
  modified_base 14: mod_base = OTHER; note = 2'-fluoro guanosine
  modified_base 15: mod_base = OTHER; note = 2'O-methyl guanosine
  modified_base 16: mod_base = OTHER; note = 2'-fluoro adenosine
  modified_base 17: mod_base = OTHER; note = 2'O-methyl cytidine
  modified_base 18: mod_base = OTHER; note = 2'-fluoro uridine
  modified_base 19: mod_base = OTHER; note = 2'O-methyl uridine phosphorothioate
  modified_base 20: mod_base = OTHER; note = 2'O-methyl uridine phosphorothioate
  modified_base 21: mod_base = OTHER; note = 2'O-methyl uridine
gaagaaagttcgtggactttt

SEQ ID NO: 1668 - RNA, 21 nt, synthetic construct
  source 1..21: mol_type = other RNA
  modified_base 1: mod_base = OTHER; note = 2'O-methyl uridine phosphorothioate
  modified_base 2: mod_base = OTHER; note = 2'-fluoro guanosine phosphorothioate
  modified_base 3: mod_base = OTHER; note = 2'O-methyl adenosine
  modified_base 4: mod_base = OTHER; note = 2'-fluoro adenosine
  modified_base 5: mod_base = OTHER; note = 2'O-methyl guanosine
  modified_base 6: mod_base = OTHER; note = 2'-fluoro adenosine
  modified_base 7: mod_base = OTHER; note = 2'O-methyl adenosine
  modified_base 8: mod_base = OTHER; note = 2'-fluoro adenosine
  modified_base 9: mod_base = OTHER; note = 2'O-methyl guanosine
  modified_base 10: mod_base = OTHER; note = 2'-fluoro uridine
  modified_base 11: mod_base = OTHER; note = 2'O-methyl uridine
  modified_base 12: mod_base = OTHER; note = 2'-fluoro cytidine
  modified_base 13: mod_base = OTHER; note = 2'O-methyl guanosine
  modified_base 14: mod_base = OTHER; note = 2'-fluoro uridine
  modified_base 15: mod_base = OTHER; note = 2'O-methyl guanosine
  modified_base 16: mod_base = OTHER; note = 2'-fluoro guanosine
  modified_base 17: mod_base = OTHER; note = 2'O-methyl adenosine
  modified_base 18: mod_base = OTHER; note = 2'-fluoro cytidine
  modified_base 19: mod_base = OTHER; note = 2'O-methyl uridine phosphorothioate
  modified_base 20: mod_base = OTHER; note = 2'O-methyl uridine phosphorothioate
  modified_base 21: mod_base = OTHER; note = 2'O-methyl uridine
tgaagaaagttcgtggacttt

SEQ ID NO: 1669 - RNA, 21 nt, synthetic construct
  source 1..21: mol_type = other RNA
  modified_base 1: mod_base = OTHER; note = 2'O-methyl adenosine phosphorothioate
  modified_base 2: mod_base = OTHER; note = 2'-fluoro uridine phosphorothioate
  modified_base 3: mod_base = OTHER; note = 2'O-methyl guanosine
  modified_base 4: mod_base = OTHER; note = 2'-fluoro adenosine
  modified_base 5: mod_base = OTHER; note = 2'O-methyl adenosine
  modified_base 6: mod_base = OTHER; note = 2'-fluoro guanosine
  modified_base 7: mod_base = OTHER; note = 2'O-methyl adenosine
  modified_base 8: mod_base = OTHER; note = 2'-fluoro adenosine
  modified_base 9: mod_base = OTHER; note = 2'O-methyl adenosine
  modified_base 10: mod_base = OTHER; note = 2'-fluoro guanosine
  modified_base 11: mod_base = OTHER; note = 2'O-methyl uridine
  modified_base 12: mod_base = OTHER; note = 2'-fluoro uridine
  modified_base 13: mod_base = OTHER; note = 2'O-methyl cytidine
  modified_base 14: mod_base = OTHER; note = 2'-fluoro guanosine
  modified_base 15: mod_base = OTHER; note = 2'O-methyl uridine
  modified_base 16: mod_base = OTHER; note = 2'-fluoro guanosine
  modified_base 17: mod_base = OTHER; note = 2'O-methyl guanosine
  modified_base 18: mod_base = OTHER; note = 2'-fluoro adenosine
  modified_base 19: mod_base = OTHER; note = 2'O-methyl cytidine phosphorothioate
  modified_base 20: mod_base = OTHER; note = 2'O-methyl uridine phosphorothioate
  modified_base 21: mod_base = OTHER; note = 2'O-methyl uridine
atgaagaaagttcgtggactt

SEQ ID NO: 1670 - RNA, 21 nt, synthetic construct
  source 1..21: mol_type = other RNA
  modified_base 1: mod_base = OTHER; note = 2'O-methyl cytidine phosphorothioate
  modified_base 2: mod_base = OTHER; note = 2'-fluoro adenosine phosphorothioate
  modified_base 3: mod_base = OTHER; note = 2'O-methyl uridine
  modified_base 4: mod_base = OTHER; note = 2'-fluoro guanosine
  modified_base 5: mod_base = OTHER; note = 2'O-methyl adenosine
  modified_base 6: mod_base = OTHER; note = 2'-fluoro adenosine
  modified_base 7: mod_base = OTHER; note = 2'O-methyl guanosine
  modified_base 8: mod_base = OTHER; note = 2'-fluoro adenosine
  modified_base 9: mod_base = OTHER; note = 2'O-methyl adenosine
  modified_base 10: mod_base = OTHER; note = 2'-fluoro adenosine
  modified_base 11: mod_base = OTHER; note = 2'O-methyl guanosine
  modified_base 12: mod_base = OTHER; note = 2'-fluoro uridine
  modified_base 13: mod_base = OTHER; note = 2'O-methyl uridine
  modified_base 14: mod_base = OTHER; note = 2'-fluoro cytidine
  modified_base 15: mod_base = OTHER; note = 2'O-methyl guanosine
  modified_base 16: mod_base = OTHER; note = 2'-fluoro uridine
  modified_base 17: mod_base = OTHER; note = 2'O-methyl guanosine
  modified_base 18: mod_base = OTHER; note = 2'-fluoro guanosine
  modified_base 19: mod_base = OTHER; note = 2'O-methyl adenosine phosphorothioate
  modified_base 20: mod_base = OTHER; note = 2'O-methyl uridine phosphorothioate
  modified_base 21: mod_base = OTHER; note = 2'O-methyl uridine
catgaagaaagttcgtggatt

SEQ ID NO: 1671 - RNA, 21 nt, synthetic construct
  source 1..21: mol_type = other RNA
  modified_base 1: mod_base = OTHER; note = 2'O-methyl cytidine phosphorothioate
  modified_base 2: mod_base = OTHER; note = 2'-fluoro adenosine phosphorothioate
  modified_base 3: mod_base = OTHER; note = 2'O-methyl cytidine
  modified_base 4: mod_base = OTHER; note = 2'-fluoro adenosine
  modified_base 5: mod_base = OTHER; note = 2'O-methyl uridine
  modified_base 6: mod_base = OTHER; note = 2'-fluoro guanosine
  modified_base 7: mod_base = OTHER; note = 2'O-methyl adenosine
  modified_base 8: mod_base = OTHER; note = 2'-fluoro adenosine
  modified_base 9: mod_base = OTHER; note = 2'O-methyl guanosine
  modified_base 10: mod_base = OTHER; note = 2'-fluoro adenosine
  modified_base 11: mod_base = OTHER; note = 2'O-methyl adenosine
  modified_base 12: mod_base = OTHER; note = 2'-fluoro adenosine
  modified_base 13: mod_base = OTHER; note = 2'O-methyl guanosine
  modified_base 14: mod_base = OTHER; note = 2'-fluoro uridine
  modified_base 15: mod_base = OTHER; note = 2'O-methyl uridine
  modified_base 16: mod_base = OTHER; note = 2'-fluoro cytidine
  modified_base 17: mod_base = OTHER; note = 2'O-methyl guanosine
  modified_base 18: mod_base = OTHER; note = 2'-fluoro uridine
  modified_base 19: mod_base = OTHER; note = 2'O-methyl guanosine phosphorothioate
  modified_base 20: mod_base = OTHER; note = 2'O-methyl uridine phosphorothioate
  modified_base 21: mod_base = OTHER; note = 2'O-methyl uridine
cacatgaagaaagttcgtgtt

SEQ ID NO: 1672 - RNA, 21 nt, synthetic construct
  source 1..21: mol_type = other RNA
  modified_base 1: mod_base = OTHER; note = 2'O-methyl cytidine phosphorothioate
  modified_base 2: mod_base = OTHER; note = 2'-fluoro guanosine phosphorothioate
  modified_base 3: mod_base = OTHER; note = 2'O-methyl uridine
  modified_base 4: mod_base = OTHER; note = 2'-fluoro adenosine
  modified_base 5: mod_base = OTHER; note = 2'O-methyl guanosine
  modified_base 6: mod_base = OTHER; note = 2'-fluoro adenosine
  modified_base 7: mod_base = OTHER; note = 2'O-methyl cytidine
  modified_base 8: mod_base = OTHER; note = 2'-fluoro uridine
  modified_base 9: mod_base = OTHER; note = 2'O-methyl guanosine
  modified_base 10: mod_base = OTHER; note = 2'-fluoro adenosine
  modified_base 11: mod_base = OTHER; note = 2'O-methyl guanosine
  modified_base 12: mod_base = OTHER; note = 2'-fluoro cytidine
  modified_base 13: mod_base = OTHER; note = 2'O-methyl uridine
  modified_base 14: mod_base = OTHER; note = 2'-fluoro uridine
  modified_base 15: mod_base = OTHER; note = 2'O-methyl guanosine
  modified_base 16: mod_base = OTHER; note = 2'-fluoro guanosine
  modified_base 17: mod_base = OTHER; note = 2'O-methyl uridine
  modified_base 18: mod_base = OTHER; note = 2'-fluoro guanosine
  modified_base 19: mod_base = OTHER; note = 2'O-methyl adenosine phosphorothioate
  modified_base 20: mod_base = OTHER; note = 2'O-methyl uridine phosphorothioate
  modified_base 21: mod_base = OTHER; note = 2'O-methyl uridine
cgtagactgagcttggtgatt

SEQ ID NO: 1673 - RNA, 21 nt, synthetic construct
  source 1..21: mol_type = other RNA
  modified_base 1: mod_base = OTHER; note = 2'O-methyl guanosine phosphorothioate
  modified_base 2: mod_base = OTHER; note = 2'-fluoro cytidine phosphorothioate
  modified_base 3: mod_base = OTHER; note = 2'O-methyl guanosine
  modified_base 4: mod_base = OTHER; note = 2'-fluoro uridine
  modified_base 5: mod_base = OTHER; note = 2'O-methyl adenosine
  modified_base 6: mod_base = OTHER; note = 2'-fluoro guanosine
  modified_base 7: mod_base = OTHER; note = 2'O-methyl adenosine
  modified_base 8: mod_base = OTHER; note = 2'-fluoro cytidine
  modified_base 9: mod_base = OTHER; note = 2'O-methyl uridine
  modified_base 10: mod_base = OTHER; note = 2'-fluoro guanosine
  modified_base 11: mod_base = OTHER; note = 2'O-methyl adenosine
  modified_base 12: mod_base = OTHER; note = 2'-fluoro guanosine
  modified_base 13: mod_base = OTHER; note = 2'O-methyl cytidine
  modified_base 14: mod_base = OTHER; note = 2'-fluoro uridine
  modified_base 15: mod_base = OTHER; note = 2'O-methyl uridine
  modified_base 16: mod_base = OTHER; note = 2'-fluoro guanosine
  modified_base 17: mod_base = OTHER; note = 2'O-methyl guanosine
  modified_base 18: mod_base = OTHER; note = 2'-fluoro uridine
  modified_base 19: mod_base = OTHER; note = 2'O-methyl guanosine phosphorothioate
  modified_base 20: mod_base = OTHER; note = 2'O-methyl uridine phosphorothioate
  modified_base 21: mod_base = OTHER; note = 2'O-methyl uridine
gcgtagactgagcttggtgtt

SEQ ID NO: 1674 - RNA, 21 nt, synthetic construct
  source 1..21: mol_type = other RNA
  modified_base 1: mod_base = OTHER; note = 2'O-methyl guanosine phosphorothioate
  modified_base 2: mod_base = OTHER; note = 2'-fluoro guanosine phosphorothioate
  modified_base 3: mod_base = OTHER; note = 2'O-methyl cytidine
  modified_base 4: mod_base = OTHER; note = 2'-fluoro guanosine
  modified_base 5: mod_base = OTHER; note = 2'O-methyl uridine
  modified_base 6: mod_base = OTHER; note = 2'-fluoro adenosine
  modified_base 7: mod_base = OTHER; note = 2'O-methyl guanosine
  modified_base 8: mod_base = OTHER; note = 2'-fluoro adenosine
  modified_base 9: mod_base = OTHER; note = 2'O-methyl cytidine
  modified_base 10: mod_base = OTHER; note = 2'-fluoro uridine
  modified_base 11: mod_base = OTHER; note = 2'O-methyl guanosine
  modified_base 12: mod_base = OTHER; note = 2'-fluoro adenosine
  modified_base 13: mod_base = OTHER; note = 2'O-methyl guanosine
  modified_base 14: mod_base = OTHER; note = 2'-fluoro cytidine
  modified_base 15: mod_base = OTHER; note = 2'O-methyl uridine
  modified_base 16: mod_base = OTHER; note = 2'-fluoro uridine
  modified_base 17: mod_base = OTHER; note = 2'O-methyl guanosine
  modified_base 18: mod_base = OTHER; note = 2'-fluoro guanosine
  modified_base 19: mod_base = OTHER; note = 2'O-methyl uridine phosphorothioate
  modified_base 20: mod_base = OTHER; note = 2'O-methyl uridine phosphorothioate
  modified_base 21: mod_base = OTHER; note = 2'O-methyl uridine
ggcgtagactgagcttggttt

SEQ ID NO: 1675 - RNA, 21 nt, synthetic construct
  source 1..21: mol_type = other RNA
  modified_base 1: mod_base = OTHER; note = 2'O-methyl adenosine phosphorothioate
  modified_base 2: mod_base = OTHER; note = 2'-fluoro guanosine phosphorothioate
  modified_base 3: mod_base = OTHER; note = 2'O-methyl guanosine
  modified_base 4: mod_base = OTHER; note = 2'-fluoro cytidine
  modified_base 5: mod_base = OTHER; note = 2'O-methyl guanosine
  modified_base 6: mod_base = OTHER; note = 2'-fluoro uridine
  modified_base 7: mod_base = OTHER; note = 2'O-methyl adenosine
  modified_base 8: mod_base = OTHER; note = 2'-fluoro guanosine
  modified_base 9: mod_base = OTHER; note = 2'O-methyl adenosine
  modified_base 10: mod_base = OTHER; note = 2'-fluoro cytidine
  modified_base 11: mod_base = OTHER; note = 2'O-methyl uridine
  modified_base 12: mod_base = OTHER; note = 2'-fluoro guanosine
  modified_base 13: mod_base = OTHER; note = 2'O-methyl adenosine
  modified_base 14: mod_base = OTHER; note = 2'-fluoro guanosine
  modified_base 15: mod_base = OTHER; note = 2'O-methyl cytidine
  modified_base 16: mod_base = OTHER; note = 2'-fluoro uridine
  modified_base 17: mod_base = OTHER; note = 2'O-methyl uridine
  modified_base 18: mod_base = OTHER; note = 2'-fluoro guanosine
  modified_base 19: mod_base = OTHER; note = 2'O-methyl guanosine phosphorothioate
  modified_base 20: mod_base = OTHER; note = 2'O-methyl uridine phosphorothioate
  modified_base 21: mod_base = OTHER; note = 2'O-methyl uridine
aggcgtagactgagcttggtt

SEQ ID NO: 1676 - RNA, 21 nt, synthetic construct
  source 1..21: mol_type = other RNA
  modified_base 1: mod_base = OTHER; note = 2'O-methyl guanosine phosphorothioate
  modified_base 2: mod_base = OTHER; note = 2'-fluoro adenosine phosphorothioate
  modified_base 3: mod_base = OTHER; note = 2'O-methyl guanosine
  modified_base 4: mod_base = OTHER; note = 2'-fluoro guanosine
  modified_base 5: mod_base = OTHER; note = 2'O-methyl cytidine
  modified_base 6: mod_base = OTHER; note = 2'-fluoro guanosine
  modified_base 7: mod_base = OTHER; note = 2'O-methyl uridine
  modified_base 8: mod_base = OTHER; note = 2'-fluoro adenosine
  modified_base 9: mod_base = OTHER; note = 2'O-methyl guanosine
  modified_base 10: mod_base = OTHER; note = 2'-fluoro adenosine
  modified_base 11: mod_base = OTHER; note = 2'O-methyl cytidine
  modified_base 12: mod_base = OTHER; note = 2'-fluoro uridine
  modified_base 13: mod_base = OTHER; note = 2'O-methyl guanosine
  modified_base 14: mod_base = OTHER; note = 2'-fluoro adenosine
  modified_base 15: mod_base = OTHER; note = 2'O-methyl guanosine
  modified_base 16: mod_base = OTHER; note = 2'-fluoro cytidine
  modified_base 17: mod_base = OTHER; note = 2'O-methyl uridine
  modified_base 18: mod_base = OTHER; note = 2'-fluoro uridine
  modified_base 19: mod_base = OTHER; note = 2'O-methyl guanosine phosphorothioate
  modified_base 20: mod_base = OTHER; note = 2'O-methyl uridine phosphorothioate
  modified_base 21: mod_base = OTHER; note = 2'O-methyl uridine
gaggcgtagactgagcttgtt

SEQ ID NO: 1677 - RNA, 21 nt, synthetic construct
  source 1..21: mol_type = other RNA
  modified_base 1: mod_base = OTHER; note = 2'O-methyl cytidine phosphorothioate
  modified_base 2: mod_base = OTHER; note = 2'-fluoro adenosine phosphorothioate
  modified_base 3: mod_base = OTHER; note = 2'O-methyl guanosine
  modified_base 4: mod_base = OTHER; note = 2'-fluoro adenosine
  modified_base 5: mod_base = OTHER; note = 2'O-methyl guanosine
  modified_base 6: mod_base = OTHER; note = 2'-fluoro guanosine
  modified_base 7: mod_base = OTHER; note = 2'O-methyl cytidine
  modified_base 8: mod_base = OTHER; note = 2'-fluoro guanosine
  modified_base 9: mod_base = OTHER; note = 2'O-methyl uridine
  modified_base 10: mod_base = OTHER; note = 2'-fluoro adenosine
  modified_base 11: mod_base = OTHER; note = 2'O-methyl guanosine
  modified_base 12: mod_base = OTHER; note = 2'-fluoro adenosine
  modified_base 13: mod_base = OTHER; note = 2'O-methyl cytidine
  modified_base 14: mod_base = OTHER; note = 2'-fluoro uridine
  modified_base 15: mod_base = OTHER; note = 2'O-methyl guanosine
  modified_base 16: mod_base = OTHER; note = 2'-fluoro adenosine
  modified_base 17: mod_base = OTHER; note = 2'O-methyl guanosine
  modified_base 18: mod_base = OTHER; note = 2'-fluoro cytidine
  modified_base 19: mod_base = OTHER; note = 2'O-methyl uridine phosphorothioate
  modified_base 20: mod_base = OTHER; note = 2'O-methyl uridine phosphorothioate
  modified_base 21: mod_base = OTHER; note = 2'O-methyl uridine
cagaggcgtagactgagcttt

SEQ ID NO: 1678 - RNA, 21 nt, synthetic construct
  source 1..21: mol_type = other RNA
  modified_base 1: mod_base = OTHER; note = 2'O-methyl uridine phosphorothioate
  modified_base 2: mod_base = OTHER; note = 2'-fluoro guanosine phosphorothioate
  modified_base 3: mod_base = OTHER; note = 2'O-methyl uridine
  modified_base 4: mod_base = OTHER; note = 2'-fluoro guanosine
  modified_base 5: mod_base = OTHER; note = 2'O-methyl cytidine
  modified_base 6: mod_base = OTHER; note = 2'-fluoro adenosine
  modified_base 7: mod_base = OTHER; note = 2'O-methyl guanosine
  modified_base 8: mod_base = OTHER; note = 2'-fluoro adenosine
  modified_base 9: mod_base = OTHER; note = 2'O-methyl guanosine
  modified_base 10: mod_base = OTHER; note = 2'-fluoro guanosine
  modified_base 11: mod_base = OTHER; note = 2'O-methyl cytidine
  modified_base 12: mod_base = OTHER; note = 2'-fluoro guanosine
  modified_base 13: mod_base = OTHER; note = 2'O-methyl uridine
  modified_base 14: mod_base = OTHER; note = 2'-fluoro adenosine
  modified_base 15: mod_base = OTHER; note = 2'O-methyl guanosine
  modified_base 16: mod_base = OTHER; note = 2'-fluoro adenosine
  modified_base 17: mod_base = OTHER; note = 2'O-methyl cytidine
  modified_base 18: mod_base = OTHER; note = 2'-fluoro uridine
  modified_base 19: mod_base = OTHER; note = 2'O-methyl guanosine phosphorothioate
  modified_base 20: mod_base = OTHER; note = 2'O-methyl uridine phosphorothioate
  modified_base 21: mod_base = OTHER; note = 2'O-methyl uridine
tgtgcagaggcgtagactgtt

SEQ ID NO: 1679 - RNA, 21 nt, synthetic construct
  source 1..21: mol_type = other RNA
  modified_base 1: mod_base = OTHER; note = 2'O-methyl cytidine phosphorothioate
  modified_base 2: mod_base = OTHER; note = 2'-fluoro uridine phosphorothioate
  modified_base 3: mod_base = OTHER; note = 2'O-methyl guanosine
  modified_base 4: mod_base = OTHER; note = 2'-fluoro uridine
  modified_base 5: mod_base = OTHER; note = 2'O-methyl guanosine
  modified_base 6: mod_base = OTHER; note = 2'-fluoro cytidine
  modified_base 7: mod_base = OTHER; note = 2'O-methyl adenosine
  modified_base 8: mod_base = OTHER; note = 2'-fluoro guanosine
  modified_base 9: mod_base = OTHER; note = 2'O-methyl adenosine
  modified_base 10: mod_base = OTHER; note = 2'-fluoro guanosine
  modified_base 11: mod_base = OTHER; note = 2'O-methyl guanosine
  modified_base 12: mod_base = OTHER; note = 2'-fluoro cytidine
  modified_base 13: mod_base = OTHER; note = 2'O-methyl guanosine
  modified_base 14: mod_base = OTHER; note = 2'-fluoro uridine
  modified_base 15: mod_base = OTHER; note = 2'O-methyl adenosine
  modified_base 16: mod_base = OTHER; note = 2'-fluoro guanosine
  modified_base 17: mod_base = OTHER; note = 2'O-methyl adenosine
  modified_base 18: mod_base = OTHER; note = 2'-fluoro cytidine
  modified_base 19: mod_base = OTHER; note = 2'O-methyl uridine phosphorothioate
  modified_base 20: mod_base = OTHER; note = 2'O-methyl uridine phosphorothioate
  modified_base 21: mod_base = OTHER; note = 2'O-methyl uridine
ctgtgcagaggcgtagacttt

SEQ ID NO: 1680 - RNA, 21 nt, synthetic construct
  source 1..21: mol_type = other RNA
  modified_base 1: mod_base = OTHER; note = 2'O-methyl guanosine phosphorothioate
  modified_base 2: mod_base = OTHER; note = 2'-fluoro uridine phosphorothioate
  modified_base 3: mod_base = OTHER; note = 2'O-methyl uridine
  modified_base 4: mod_base = OTHER; note = 2'-fluoro cytidine
  modified_base 5: mod_base = OTHER; note = 2'O-methyl cytidine
  modified_base 6: mod_base = OTHER; note = 2'-fluoro cytidine
  modified_base 7: mod_base = OTHER; note = 2'O-methyl uridine
  modified_base 8: mod_base = OTHER; note = 2'-fluoro guanosine
  modified_base 9: mod_base = OTHER; note = 2'O-methyl uridine
  modified_base 10: mod_base = OTHER; note = 2'-fluoro guanosine
  modified_base 11: mod_base = OTHER; note = 2'O-methyl cytidine
  modified_base 12: mod_base = OTHER; note = 2'-fluoro adenosine
  modified_base 13: mod_base = OTHER; note = 2'O-methyl guanosine
  modified_base 14: mod_base = OTHER; note = 2'-fluoro adenosine
  modified_base 15: mod_base = OTHER; note = 2'O-methyl guanosine
  modified_base 16: mod_base = OTHER; note = 2'-fluoro guanosine
  modified_base 17: mod_base = OTHER; note = 2'O-methyl cytidine
  modified_base 18: mod_base = OTHER; note = 2'-fluoro guanosine
  modified_base 19: mod_base = OTHER; note = 2'O-methyl uridine phosphorothioate
  modified_base 20: mod_base = OTHER; note = 2'O-methyl uridine phosphorothioate
  modified_base 21: mod_base = OTHER; note = 2'O-methyl uridine
gttccctgtgcagaggcgttt

SEQ ID NO: 1681 - RNA, 21 nt, synthetic construct
  source 1..21: mol_type = other RNA
  modified_base 1: mod_base = OTHER; note = 2'O-methyl guanosine phosphorothioate
  modified_base 2: mod_base = OTHER; note = 2'-fluoro uridine phosphorothioate
  modified_base 3: mod_base = OTHER; note = 2'O-methyl adenosine
  modified_base 4: mod_base = OTHER; note = 2'-fluoro guanosine
  modified_base 5: mod_base = OTHER; note = 2'O-methyl adenosine
  modified_base 6: mod_base = OTHER; note = 2'-fluoro guanosine
  modified_base 7: mod_base = OTHER; note = 2'O-methyl guanosine
  modified_base 8: mod_base = OTHER; note = 2'-fluoro uridine
  modified_base 9: mod_base = OTHER; note = 2'O-methyl uridine
  modified_base 10: mod_base = OTHER; note = 2'-fluoro cytidine
  modified_base 11: mod_base = OTHER; note = 2'O-methyl cytidine
  modified_base 12: mod_base = OTHER; note = 2'-fluoro cytidine
  modified_base 13: mod_base = OTHER; note = 2'O-methyl uridine
  modified_base 14: mod_base = OTHER; note = 2'-fluoro guanosine
  modified_base 15: mod_base = OTHER; note = 2'O-methyl uridine
  modified_base 16: mod_base = OTHER; note = 2'-fluoro guanosine
  modified_base 17: mod_base = OTHER; note = 2'O-methyl cytidine
  modified_base 18: mod_base = OTHER; note = 2'-fluoro adenosine
  modified_base 19: mod_base = OTHER; note = 2'O-methyl guanosine phosphorothioate
  modified_base 20: mod_base = OTHER; note = 2'O-methyl uridine phosphorothioate
  modified_base 21: mod_base = OTHER; note = 2'O-methyl uridine
gtagaggttccctgtgcagtt

SEQ ID NO: 1682 - RNA, 21 nt, synthetic construct
  source 1..21: mol_type = other RNA
  modified_base 1: mod_base = OTHER; note = 2'O-methyl guanosine phosphorothioate
  modified_base 2: mod_base = OTHER; note = 2'-fluoro guanosine phosphorothioate
  modified_base 3: mod_base = OTHER; note = 2'O-methyl uridine
  modified_base 4: mod_base = OTHER; note = 2'-fluoro adenosine
  modified_base 5: mod_base = OTHER; note = 2'O-methyl guanosine
  modified_base 6: mod_base = OTHER; note = 2'-fluoro adenosine
  modified_base 7: mod_base = OTHER; note = 2'O-methyl guanosine
  modified_base 8: mod_base = OTHER; note = 2'-fluoro guanosine
  modified_base 9: mod_base = OTHER; note = 2'O-methyl uridine
  modified_base 10: mod_base = OTHER; note = 2'-fluoro uridine
  modified_base 11: mod_base = OTHER; note = 2'O-methyl cytidine
  modified_base 12: mod_base = OTHER; note = 2'-fluoro cytidine
  modified_base 13: mod_base = OTHER; note = 2'O-methyl cytidine
  modified_base 14: mod_base = OTHER; note = 2'-fluoro uridine
  modified_base 15: mod_base = OTHER; note = 2'O-methyl guanosine
  modified_base 16: mod_base = OTHER; note = 2'-fluoro uridine
  modified_base 17: mod_base = OTHER; note = 2'O-methyl guanosine
  modified_base 18: mod_base = OTHER; note = 2'-fluoro cytidine
  modified_base 19: mod_base = OTHER; note = 2'O-methyl adenosine phosphorothioate
  modified_base 20: mod_base = OTHER; note = 2'O-methyl uridine phosphorothioate
  modified_base 21: mod_base = OTHER; note = 2'O-methyl uridine
ggtagaggttccctgtgcatt

SEQ ID NO: 1683 - RNA, 21 nt, synthetic construct
  source 1..21: mol_type = other RNA
  modified_base 1: mod_base = OTHER; note = 2'O-methyl guanosine phosphorothioate
  modified_base 2: mod_base = OTHER; note = 2'-fluoro adenosine phosphorothioate
  modified_base 3: mod_base = OTHER; note = 2'O-methyl adenosine
  modified_base 4: mod_base = OTHER; note = 2'-fluoro guanosine
  modified_base 5: mod_base = OTHER; note = 2'O-methyl guanosine
  modified_base 6: mod_base = OTHER; note = 2'-fluoro uridine
  modified_base 7: mod_base = OTHER; note = 2'O-methyl adenosine
  modified_base 8: mod_base = OTHER; note = 2'-fluoro guanosine
  modified_base 9: mod_base = OTHER; note = 2'O-methyl adenosine
  modified_base 10: mod_base = OTHER; note = 2'-fluoro guanosine
  modified_base 11: mod_base = OTHER; note = 2'O-methyl guanosine
  modified_base 12: mod_base = OTHER; note = 2'-fluoro uridine
  modified_base 13: mod_base = OTHER; note = 2'O-methyl uridine
  modified_base 14: mod_base = OTHER; note = 2'-fluoro cytidine
  modified_base 15: mod_base = OTHER; note = 2'O-methyl cytidine
  modified_base 16: mod_base = OTHER; note = 2'-fluoro cytidine
  modified_base 17: mod_base = OTHER; note = 2'O-methyl uridine
  modified_base 18: mod_base = OTHER; note = 2'-fluoro guanosine
  modified_base 19: mod_base = OTHER; note = 2'O-methyl uridine phosphorothioate
  modified_base 20: mod_base = OTHER; note = 2'O-methyl uridine phosphorothioate
  modified_base 21: mod_base = OTHER; note = 2'O-methyl uridine
gaaggtagaggttccctgttt

SEQ ID NO: 1684 - RNA, 21 nt, synthetic construct
  source 1..21: mol_type = other RNA
  modified_base 1: mod_base = OTHER; note = 2'O-methyl uridine phosphorothioate
  modified_base 2: mod_base = OTHER; note = 2'-fluoro cytidine phosphorothioate
  modified_base 3: mod_base = OTHER; note = 2'O-methyl uridine
  modified_base 4: mod_base = OTHER; note = 2'-fluoro cytidine
  modified_base 5: mod_base = OTHER; note = 2'O-methyl uridine
  modified_base 6: mod_base = OTHER; note = 2'-fluoro cytidine
  modified_base 7: mod_base = OTHER; note = 2'O-methyl cytidine
  modified_base 8: mod_base = OTHER; note = 2'-fluoro cytidine
  modified_base 9: mod_base = OTHER; note = 2'O-methyl adenosine
  modified_base 10: mod_base = OTHER; note = 2'-fluoro guanosine
  modified_base 11: mod_base = OTHER; note = 2'O-methyl cytidine
  modified_base 12: mod_base = OTHER; note = 2'-fluoro adenosine
  modified_base 13: mod_base = OTHER; note = 2'O-methyl cytidine
  modified_base 14: mod_base = OTHER; note = 2'-fluoro cytidine
  modified_base 15: mod_base = OTHER; note = 2'O-methyl uridine
  modified_base 16: mod_base = OTHER; note = 2'-fluoro uridine
  modified_base 17: mod_base = OTHER; note = 2'O-methyl guanosine
  modified_base 18: mod_base = OTHER; note = 2'-fluoro adenosine
  modified_base 19: mod_base = OTHER; note = 2'O-methyl guanosine phosphorothioate
  modified_base 20: mod_base = OTHER; note = 2'O-methyl uridine phosphorothioate
  modified_base 21: mod_base = OTHER; note = 2'O-methyl uridine
tctctcccagcaccttgagtt

SEQ ID NO: 1685 - RNA, 21 nt, synthetic construct
  source 1..21: mol_type = other RNA
  modified_base 1: mod_base = OTHER; note = 2'O-methyl adenosine phosphorothioate
  modified_base 2: mod_base = OTHER; note = 2'-fluoro uridine phosphorothioate
  modified_base 3: mod_base = OTHER; note = 2'O-methyl adenosine
  modified_base 4: mod_base = OTHER; note = 2'-fluoro uridine
  modified_base 5: mod_base = OTHER; note = 2'O-methyl cytidine
  modified_base 6: mod_base = OTHER; note = 2'-fluoro uridine
  modified_base 7: mod_base = OTHER; note = 2'O-methyl cytidine
  modified_base 8: mod_base = OTHER; note = 2'-fluoro uridine
  modified_base 9: mod_base = OTHER; note = 2'O-methyl cytidine
  modified_base 10: mod_base = OTHER; note = 2'-fluoro cytidine
  modified_base 11: mod_base = OTHER; note = 2'O-methyl cytidine
  modified_base 12: mod_base = OTHER; note = 2'-fluoro adenosine
  modified_base 13: mod_base = OTHER; note = 2'O-methyl guanosine
  modified_base 14: mod_base = OTHER; note = 2'-fluoro cytidine
  modified_base 15: mod_base = OTHER; note = 2'O-methyl adenosine
  modified_base 16: mod_base = OTHER; note = 2'-fluoro cytidine
  modified_base 17: mod_base = OTHER; note = 2'O-methyl cytidine
  modified_base 18: mod_base = OTHER; note = 2'-fluoro uridine
  modified_base 19: mod_base = OTHER; note = 2'O-methyl uridine phosphorothioate
  modified_base 20: mod_base = OTHER; note = 2'O-methyl uridine phosphorothioate
  modified_base 21: mod_base = OTHER; note = 2'O-methyl uridine
atatctctcccagcacctttt

SEQ ID NO: 1686 - RNA, 21 nt, synthetic construct
  source 1..21: mol_type = other RNA
  modified_base 1: mod_base = OTHER; note = 2'O-methyl cytidine phosphorothioate
  modified_base 2: mod_base = OTHER; note = 2'-fluoro adenosine phosphorothioate
  modified_base 3: mod_base = OTHER; note = 2'O-methyl uridine
  modified_base 4: mod_base = OTHER; note = 2'-fluoro adenosine
  modified_base 5: mod_base = OTHER; note = 2'O-methyl uridine
  modified_base 6: mod_base = OTHER; note = 2'-fluoro cytidine
  modified_base 7: mod_base = OTHER; note = 2'O-methyl uridine
  modified_base 8: mod_base = OTHER; note = 2'-fluoro cytidine
  modified_base 9: mod_base = OTHER; note = 2'O-methyl uridine
  modified_base 10: mod_base = OTHER; note = 2'-fluoro cytidine
  modified_base 11: mod_base = OTHER; note = 2'O-methyl cytidine
  modified_base 12: mod_base = OTHER; note = 2'-fluoro cytidine
  modified_base 13: mod_base = OTHER; note = 2'O-methyl adenosine
  modified_base 14: mod_base = OTHER; note = 2'-fluoro guanosine
  modified_base 15: mod_base = OTHER; note = 2'O-methyl cytidine
  modified_base 16: mod_base = OTHER; note = 2'-fluoro adenosine
  modified_base 17: mod_base = OTHER; note = 2'O-methyl cytidine
  modified_base 18: mod_base = OTHER; note = 2'-fluoro cytidine
  modified_base 19: mod_base = OTHER; note = 2'O-methyl uridine phosphorothioate
  modified_base 20: mod_base = OTHER; note = 2'O-methyl uridine phosphorothioate
  modified_base 21: mod_base = OTHER; note = 2'O-methyl uridine
catatctctcccagcaccttt

SEQ ID NO: 1687 - RNA, 21 nt, synthetic construct
  source 1..21: mol_type = other RNA
  modified_base 1: mod_base = OTHER; note = 2'O-methyl guanosine phosphorothioate
  modified_base 2: mod_base = OTHER; note = 2'-fluoro cytidine phosphorothioate
  modified_base 3: mod_base = OTHER; note = 2'O-methyl adenosine
  modified_base 4: mod_base = OTHER; note = 2'-fluoro uridine
  modified_base 5: mod_base = OTHER; note = 2'O-methyl adenosine
  modified_base 6: mod_base = OTHER; note = 2'-fluoro uridine
  modified_base 7: mod_base = OTHER; note = 2'O-methyl cytidine
  modified_base 8: mod_base = OTHER; note = 2'-fluoro uridine
  modified_base 9: mod_base = OTHER; note = 2'O-methyl cytidine
  modified_base 10: mod_base = OTHER; note = 2'-fluoro uridine
  modified_base 11: mod_base = OTHER; note = 2'O-methyl cytidine
  modified_base 12: mod_base = OTHER; note = 2'-fluoro cytidine
  modified_base 13: mod_base = OTHER; note = 2'O-methyl cytidine
  modified_base 14: mod_base = OTHER; note = 2'-fluoro adenosine
  modified_base 15: mod_base = OTHER; note = 2'O-methyl guanosine
  modified_base 16: mod_base = OTHER; note = 2'-fluoro cytidine
  modified_base 17: mod_base = OTHER; note = 2'O-methyl adenosine
  modified_base 18: mod_base = OTHER; note = 2'-fluoro cytidine
  modified_base 19: mod_base = OTHER; note = 2'O-methyl cytidine phosphorothioate
  modified_base 20: mod_base = OTHER; note = 2'O-methyl uridine phosphorothioate
  modified_base 21: mod_base = OTHER; note = 2'O-methyl uridine
gcatatctctcccagcacctt

SEQ ID NO: 1688 - RNA, 21 nt, synthetic construct
  source 1..21: mol_type = other RNA
  modified_base 1: mod_base = OTHER; note = 2'O-methyl guanosine phosphorothioate
  modified_base 2: mod_base = OTHER; note = 2'-fluoro guanosine phosphorothioate
  modified_base 3: mod_base = OTHER; note = 2'O-methyl cytidine
  modified_base 4: mod_base = OTHER; note = 2'-fluoro adenosine
  modified_base 5: mod_base = OTHER; note = 2'O-methyl uridine
  modified_base 6: mod_base = OTHER; note = 2'-fluoro adenosine
  modified_base 7: mod_base = OTHER; note = 2'O-methyl uridine
  modified_base 8: mod_base = OTHER; note = 2'-fluoro cytidine
  modified_base 9: mod_base = OTHER; note = 2'O-methyl uridine
  modified_base 10: mod_base = OTHER; note = 2'-fluoro cytidine
  modified_base 11: mod_base = OTHER; note = 2'O-methyl uridine
  modified_base 12: mod_base = OTHER; note = 2'-fluoro cytidine
  modified_base 13: mod_base = OTHER; note = 2'O-methyl cytidine
  modified_base 14: mod_base = OTHER; note = 2'-fluoro cytidine
  modified_base 15: mod_base = OTHER; note = 2'O-methyl adenosine
  modified_base 16: mod_base = OTHER; note = 2'-fluoro guanosine
  modified_base 17: mod_base = OTHER; note = 2'O-methyl cytidine
  modified_base 18: mod_base = OTHER; note = 2'-fluoro adenosine
  modified_base 19: mod_base = OTHER; note = 2'O-methyl cytidine phosphorothioate
  modified_base 20: mod_base = OTHER; note = 2'O-methyl uridine phosphorothioate
  modified_base 21: mod_base = OTHER; note = 2'O-methyl uridine
ggcatatctctcccagcactt

SEQ ID NO: 1689 - RNA, 21 nt, synthetic construct
  source 1..21: mol_type = other RNA
  modified_base 1: mod_base = OTHER; note = 2'O-methyl adenosine phosphorothioate
  modified_base 2: mod_base = OTHER; note = 2'-fluoro guanosine phosphorothioate
  modified_base 3: mod_base = OTHER; note = 2'O-methyl guanosine
  modified_base 4: mod_base = OTHER; note = 2'-fluoro cytidine
  modified_base 5: mod_base = OTHER; note = 2'O-methyl adenosine
  modified_base 6: mod_base = OTHER; note = 2'-fluoro uridine
  modified_base 7: mod_base = OTHER; note = 2'O-methyl adenosine
  modified_base 8: mod_base = OTHER; note = 2'-fluoro uridine
  modified_base 9: mod_base = OTHER; note = 2'O-methyl cytidine
  modified_base 10: mod_base = OTHER; note = 2'-fluoro uridine
  modified_base 11: mod_base = OTHER; note = 2'O-methyl cytidine
  modified_base 12: mod_base = OTHER; note = 2'-fluoro uridine
  modified_base 13: mod_base = OTHER; note = 2'O-methyl cytidine
  modified_base 14: mod_base = OTHER; note = 2'-fluoro cytidine
  modified_base 15: mod_base = OTHER; note = 2'O-methyl cytidine
  modified_base 16: mod_base = OTHER; note = 2'-fluoro adenosine
  modified_base 17: mod_base = OTHER; note = 2'O-methyl guanosine
  modified_base 18: mod_base = OTHER; note = 2'-fluoro cytidine
  modified_base 19: mod_base = OTHER; note = 2'O-methyl adenosine phosphorothioate
  modified_base 20: mod_base = OTHER; note = 2'O-methyl uridine phosphorothioate
  modified_base 21: mod_base = OTHER; note = 2'O-methyl uridine
aggcatatctctcccagcatt

SEQ ID NO: 1690 - RNA, 21 nt, synthetic construct
  source 1..21: mol_type = other RNA
  modified_base 1: mod_base = OTHER; note = 2'O-methyl cytidine phosphorothioate
  modified_base 2: mod_base = OTHER; note = 2'-fluoro uridine phosphorothioate
  modified_base 3: mod_base = OTHER; note = 2'O-methyl cytidine
  modified_base 4: mod_base = OTHER; note = 2'-fluoro guanosine
  modified_base 5: mod_base = OTHER; note = 2'O-methyl adenosine
  modified_base 6: mod_base = OTHER; note = 2'-fluoro adenosine
  modified_base 7: mod_base = OTHER; note = 2'O-methyl guanosine
  modified_base 8: mod_base = OTHER; note = 2'-fluoro guanosine
  modified_base 9: mod_base = OTHER; note = 2'O-methyl cytidine
  modified_base 10: mod_base = OTHER; note = 2'-fluoro adenosine
  modified_base 11: mod_base = OTHER; note = 2'O-methyl uridine
  modified_base 12: mod_base = OTHER; note = 2'-fluoro adenosine
  modified_base 13: mod_base = OTHER; note = 2'O-methyl uridine
  modified_base 14: mod_base = OTHER; note = 2'-fluoro cytidine
  modified_base 15: mod_base = OTHER; note = 2'O-methyl uridine
  modified_base 16: mod_base = OTHER; note = 2'-fluoro cytidine
  modified_base 17: mod_base = OTHER; note = 2'O-methyl uridine
  modified_base 18: mod_base = OTHER; note = 2'-fluoro cytidine
  modified_base 19: mod_base = OTHER; note = 2'O-methyl cytidine phosphorothioate
  modified_base 20: mod_base = OTHER; note = 2'O-methyl uridine phosphorothioate
  modified_base 21: mod_base = OTHER; note = 2'O-methyl uridine
ctcgaaggcatatctctcctt

SEQ ID NO: 1691 - RNA, 21 nt, synthetic construct
  source 1..21: mol_type = other RNA
  modified_base 1: mod_base = OTHER; note = 2'O-methyl cytidine phosphorothioate
  modified_base 2: mod_base = OTHER; note = 2'-fluoro uridine phosphorothioate
  modified_base 3: mod_base = OTHER; note = 2'O-methyl cytidine
  modified_base 4: mod_base = OTHER; note = 2'-fluoro uridine
  modified_base 5: mod_base = OTHER; note = 2'O-methyl uridine
  modified_base 6: mod_base = OTHER; note = 2'-fluoro cytidine
  modified_base 7: mod_base = OTHER; note = 2'O-methyl cytidine
  modified_base 8: mod_base = OTHER; note = 2'-fluoro adenosine
  modified_base 9: mod_base = OTHER; note = 2'O-methyl adenosine
  modified_base 10: mod_base = OTHER; note = 2'-fluoro guanosine
  modified_base 11: mod_base = OTHER; note = 2'O-methyl adenosine
  modified_base 12: mod_base = OTHER; note = 2'-fluoro adenosine
  modified_base 13: mod_base = OTHER; note = 2'O-methyl cytidine
  modified_base 14: mod_base = OTHER; note = 2'-fluoro cytidine
  modified_base 15: mod_base = OTHER; note = 2'O-methyl uridine
  modified_base 16: mod_base = OTHER; note = 2'-fluoro guanosine
  modified_base 17: mod_base = OTHER; note = 2'O-methyl adenosine
  modified_base 18: mod_base = OTHER; note = 2'-fluoro adenosine
  modified_base 19: mod_base = OTHER; note = 2'O-methyl uridine phosphorothioate
  modified_base 20: mod_base = OTHER; note = 2'O-methyl uridine phosphorothioate
  modified_base 21: mod_base = OTHER; note = 2'O-methyl uridine
ctcttccaagaacctgaattt

SEQ ID NO: 1692 - RNA, 21 nt, synthetic construct
  source 1..21: mol_type = other RNA
  modified_base 1: mod_base = OTHER; note = 2'O-methyl uridine phosphorothioate
  modified_base 2: mod_base = OTHER; note = 2'-fluoro uridine phosphorothioate
  modified_base 3: mod_base = OTHER; note = 2'O-methyl cytidine
  modified_base 4: mod_base = OTHER; note = 2'-fluoro uridine
  modified_base 5: mod_base = OTHER; note = 2'O-methyl cytidine
  modified_base 6: mod_base = OTHER; note = 2'-fluoro uridine
  modified_base 7: mod_base = OTHER; note = 2'O-methyl uridine
  modified_base 8: mod_base = OTHER; note = 2'-fluoro cytidine
  modified_base 9: mod_base = OTHER; note = 2'O-methyl cytidine
  modified_base 10: mod_base = OTHER; note = 2'-fluoro adenosine
  modified_base 11: mod_base = OTHER; note = 2'O-methyl adenosine
  modified_base 12: mod_base = OTHER; note = 2'-fluoro guanosine
  modified_base 13: mod_base = OTHER; note = 2'O-methyl adenosine
  modified_base 14: mod_base = OTHER; note = 2'-fluoro adenosine
  modified_base 15: mod_base = OTHER; note = 2'O-methyl cytidine
  modified_base 16: mod_base = OTHER; note = 2'-fluoro cytidine
  modified_base 17: mod_base = OTHER; note = 2'O-methyl uridine
  modified_base 18: mod_base = OTHER; note = 2'-fluoro guanosine
  modified_base 19: mod_base = OTHER; note = 2'O-methyl adenosine phosphorothioate
  modified_base 20: mod_base = OTHER; note = 2'O-methyl uridine phosphorothioate
  modified_base 21: mod_base = OTHER; note = 2'O-methyl uridine
ttctcttccaagaacctgatt

SEQ ID NO: 1693 - RNA, 21 nt, synthetic construct
  source 1..21: mol_type = other RNA
  modified_base 1: mod_base = OTHER; note = 2'O-methyl adenosine phosphorothioate
  modified_base 2: mod_base = OTHER; note = 2'-fluoro uridine phosphorothioate
  modified_base 3: mod_base = OTHER; note = 2'O-methyl guanosine
  modified_base 4: mod_base = OTHER; note = 2'-fluoro cytidine
  modified_base 5: mod_base = OTHER; note = 2'O-methyl cytidine
  modified_base 6: mod_base = OTHER; note = 2'-fluoro cytidine
  modified_base 7: mod_base = OTHER; note = 2'O-methyl uridine
  modified_base 8: mod_base = OTHER; note = 2'-fluoro uridine
  modified_base 9: mod_base = OTHER; note = 2'O-methyl cytidine
  modified_base 10: mod_base = OTHER; note = 2'-fluoro uridine
  modified_base 11: mod_base = OTHER; note = 2'O-methyl cytidine
  modified_base 12: mod_base = OTHER; note = 2'-fluoro uridine
  modified_base 13: mod_base = OTHER; note = 2'O-methyl uridine
  modified_base 14: mod_base = OTHER; note = 2'-fluoro cytidine
  modified_base 15: mod_base = OTHER; note = 2'O-methyl cytidine
  modified_base 16: mod_base = OTHER; note = 2'-fluoro adenosine
  modified_base 17: mod_base = OTHER; note = 2'O-methyl adenosine
  modified_base 18: mod_base = OTHER; note = 2'-fluoro guanosine
  modified_base 19: mod_base = OTHER; note = 2'O-methyl adenosine phosphorothioate
  modified_base 20: mod_base = OTHER; note = 2'O-methyl uridine phosphorothioate
  modified_base 21: mod_base = OTHER; note = 2'O-methyl uridine
atgcccttctcttccaagatt

SEQ ID NO: 1694 - RNA, 21 nt, synthetic construct
  source 1..21: mol_type = other RNA
  modified_base 1: mod_base = OTHER; note = 2'O-methyl guanosine phosphorothioate
  modified_base 2: mod_base = OTHER; note = 2'-fluoro adenosine phosphorothioate
  modified_base 3: mod_base = OTHER; note = 2'O-methyl uridine
  modified_base 4: mod_base = OTHER; note = 2'-fluoro guanosine
  modified_base 5: mod_base = OTHER; note = 2'O-methyl cytidine
  modified_base 6: mod_base = OTHER; note = 2'-fluoro cytidine
  modified_base 7: mod_base = OTHER; note = 2'O-methyl cytidine
  modified_base 8: mod_base = OTHER; note = 2'-fluoro uridine
  modified_base 9: mod_base = OTHER; note = 2'O-methyl uridine
  modified_base 10: mod_base = OTHER; note = 2'-fluoro cytidine
  modified_base 11: mod_base = OTHER; note = 2'O-methyl uridine
  modified_base 12: mod_base = OTHER; note = 2'-fluoro cytidine
  modified_base 13: mod_base = OTHER; note = 2'O-methyl uridine
  modified_base 14: mod_base = OTHER; note = 2'-fluoro uridine
  modified_base 15: mod_base = OTHER; note = 2'O-methyl cytidine
  modified_base 16: mod_base = OTHER; note = 2'-fluoro cytidine
  modified_base 17: mod_base = OTHER; note = 2'O-methyl adenosine
  modified_base 18: mod_base = OTHER; note = 2'-fluoro adenosine
  modified_base 19: mod_base = OTHER; note = 2'O-methyl guanosine phosphorothioate
  modified_base 20: mod_base = OTHER; note = 2'O-methyl uridine phosphorothioate
  modified_base 21: mod_base = OTHER; note = 2'O-methyl uridine
gatgcccttctcttccaagtt

SEQ ID NO: 1695 - RNA, 21 nt, synthetic construct
  source 1..21: mol_type = other RNA
  modified_base 1: mod_base = OTHER; note = 2'O-methyl adenosine phosphorothioate
  modified_base 2: mod_base = OTHER; note = 2'-fluoro guanosine phosphorothioate
  modified_base 3: mod_base = OTHER; note = 2'O-methyl adenosine
  modified_base 4: mod_base = OTHER; note = 2'-fluoro uridine
  modified_base 5: mod_base = OTHER; note = 2'O-methyl guanosine
  modified_base 6: mod_base = OTHER; note = 2'-fluoro cytidine
  modified_base 7: mod_base = OTHER; note = 2'O-methyl cytidine
  modified_base 8: mod_base = OTHER; note = 2'-fluoro cytidine
  modified_base 9: mod_base = OTHER; note = 2'O-methyl uridine
  modified_base 10: mod_base = OTHER; note = 2'-fluoro uridine
  modified_base 11: mod_base = OTHER; note = 2'O-methyl cytidine
  modified_base 12: mod_base = OTHER; note = 2'-fluoro uridine
  modified_base 13: mod_base = OTHER; note = 2'O-methyl cytidine
  modified_base 14: mod_base = OTHER; note = 2'-fluoro uridine
  modified_base 15: mod_base = OTHER; note = 2'O-methyl uridine
  modified_base 16: mod_base = OTHER; note = 2'-fluoro cytidine
  modified_base 17: mod_base = OTHER; note = 2'O-methyl cytidine
  modified_base 18: mod_base = OTHER; note = 2'-fluoro adenosine
  modified_base 19: mod_base = OTHER; note = 2'O-methyl adenosine phosphorothioate
  modified_base 20: mod_base = OTHER; note = 2'O-methyl uridine phosphorothioate
  modified_base 21: mod_base = OTHER; note = 2'O-methyl uridine
agatgcccttctcttccaatt

SEQ ID NO: 1696 - RNA, 21 nt, synthetic construct
  source 1..21: mol_type = other RNA
  modified_base 1: mod_base = OTHER; note = 2'O-methyl guanosine phosphorothioate
  modified_base 2: mod_base = OTHER; note = 2'-fluoro cytidine phosphorothioate
  modified_base 3: mod_base = OTHER; note = 2'O-methyl adenosine
  modified_base 4: mod_base = OTHER; note = 2'-fluoro guanosine
  modified_base 5: mod_base = OTHER; note = 2'O-methyl adenosine
  modified_base 6: mod_base = OTHER; note = 2'-fluoro uridine
  modified_base 7: mod_base = OTHER; note = 2'O-methyl guanosine
  modified_base 8: mod_base = OTHER; note = 2'-fluoro cytidine
  modified_base 9: mod_base = OTHER; note = 2'O-methyl cytidine
  modified_base 10: mod_base = OTHER; note = 2'-fluoro cytidine
  modified_base 11: mod_base = OTHER; note = 2'O-methyl uridine
  modified_base 12: mod_base = OTHER; note = 2'-fluoro uridine
  modified_base 13: mod_base = OTHER; note = 2'O-methyl cytidine
  modified_base 14: mod_base = OTHER; note = 2'-fluoro uridine
  modified_base 15: mod_base = OTHER; note = 2'O-methyl cytidine
  modified_base 16: mod_base = OTHER; note = 2'-fluoro uridine
  modified_base 17: mod_base = OTHER; note = 2'O-methyl uridine
  modified_base 18: mod_base = OTHER; note = 2'-fluoro cytidine
  modified_base 19: mod_base = OTHER; note = 2'O-methyl cytidine phosphorothioate
  modified_base 20: mod_base = OTHER; note = 2'O-methyl uridine phosphorothioate
  modified_base 21: mod_base = OTHER; note = 2'O-methyl uridine
gcagatgcccttctcttcctt

SEQ ID NO: 1697 - RNA, 21 nt, synthetic construct
  source 1..21: mol_type = other RNA
  modified_base 1: mod_base = OTHER; note = 2'O-methyl uridine phosphorothioate
  modified_base 2: mod_base = OTHER; note = 2'-fluoro guanosine phosphorothioate
  modified_base 3: mod_base = OTHER; note = 2'O-methyl cytidine
  modified_base 4: mod_base = OTHER; note = 2'-fluoro adenosine
  modified_base 5: mod_base = OTHER; note = 2'O-methyl guanosine
  modified_base 6: mod_base = OTHER; note = 2'-fluoro adenosine
  modified_base 7: mod_base = OTHER; note = 2'O-methyl uridine
  modified_base 8: mod_base = OTHER; note = 2'-fluoro guanosine
  modified_base 9: mod_base = OTHER; note = 2'O-methyl cytidine
  modified_base 10: mod_base = OTHER; note = 2'-fluoro cytidine
  modified_base 11: mod_base = OTHER; note = 2'O-methyl cytidine
  modified_base 12: mod_base = OTHER; note = 2'-fluoro uridine
  modified_base 13: mod_base = OTHER; note = 2'O-methyl uridine
  modified_base 14: mod_base = OTHER; note = 2'-fluoro cytidine
  modified_base 15: mod_base = OTHER; note = 2'O-methyl uridine
  modified_base 16: mod_base = OTHER; note = 2'-fluoro cytidine
  modified_base 17: mod_base = OTHER; note = 2'O-methyl uridine
  modified_base 18: mod_base = OTHER; note = 2'-fluoro uridine
  modified_base 19: mod_base = OTHER; note = 2'O-methyl cytidine phosphorothioate
  modified_base 20: mod_base = OTHER; note = 2'O-methyl uridine phosphorothioate
  modified_base 21: mod_base = OTHER; note = 2'O-methyl uridine
tgcagatgcccttctcttctt

SEQ ID NO: 1698 - RNA, 21 nt, synthetic construct
  source 1..21: mol_type = other RNA
  modified_base 1: mod_base = OTHER; note = 2'O-methyl uridine phosphorothioate
  modified_base 2: mod_base = OTHER; note = 2'-fluoro uridine phosphorothioate
  modified_base 3: mod_base = OTHER; note = 2'O-methyl guanosine
  modified_base 4: mod_base = OTHER; note = 2'-fluoro cytidine
  modified_base 5: mod_base = OTHER; note = 2'O-methyl adenosine
  modified_base 6: mod_base = OTHER; note = 2'-fluoro guanosine
  modified_base 7: mod_base = OTHER; note = 2'O-methyl adenosine
  modified_base 8: mod_base = OTHER; note = 2'-fluoro uridine
  modified_base 9: mod_base = OTHER; note = 2'O-methyl guanosine
  modified_base 10: mod_base = OTHER; note = 2'-fluoro cytidine
  modified_base 11: mod_base = OTHER; note = 2'O-methyl cytidine
  modified_base 12: mod_base = OTHER; note = 2'-fluoro cytidine
  modified_base 13: mod_base = OTHER; note = 2'O-methyl uridine
  modified_base 14: mod_base = OTHER; note = 2'-fluoro uridine
  modified_base 15: mod_base = OTHER; note = 2'O-methyl cytidine
  modified_base 16: mod_base = OTHER; note = 2'-fluoro uridine
  modified_base 17: mod_base = OTHER; note = 2'O-methyl cytidine
  modified_base 18: mod_base = OTHER; note = 2'-fluoro uridine
  modified_base 19: mod_base = OTHER; note = 2'O-methyl uridine phosphorothioate
  modified_base 20: mod_base = OTHER; note = 2'O-methyl uridine phosphorothioate
  modified_base 21: mod_base = OTHER; note = 2'O-methyl uridine
ttgcagatgcccttctctttt

SEQ ID NO: 1699 - RNA, 21 nt, synthetic construct
  source 1..21: mol_type = other RNA
  modified_base 1: mod_base = OTHER; note = 2'O-methyl cytidine phosphorothioate
  modified_base 2: mod_base = OTHER; note = 2'-fluoro uridine phosphorothioate
  modified_base 3: mod_base = OTHER; note = 2'O-methyl guanosine
  modified_base 4: mod_base = OTHER; note = 2'-fluoro uridine
  modified_base 5: mod_base = OTHER; note = 2'O-methyl uridine
  modified_base 6: mod_base = OTHER; note = 2'-fluoro guanosine
  modified_base 7: mod_base = OTHER; note = 2'O-methyl cytidine
  modified_base 8: mod_base = OTHER; note = 2'-fluoro adenosine
  modified_base 9: mod_base = OTHER; note = 2'O-methyl guanosine
  modified_base 10: mod_base = OTHER; note = 2'-fluoro adenosine
  modified_base 11: mod_base = OTHER; note = 2'O-methyl uridine
  modified_base 12: mod_base = OTHER; note = 2'-fluoro guanosine
  modified_base 13: mod_base = OTHER; note = 2'O-methyl cytidine
  modified_base 14: mod_base = OTHER; note = 2'-fluoro cytidine
  modified_base 15: mod_base = OTHER; note = 2'O-methyl cytidine
  modified_base 16: mod_base = OTHER; note = 2'-fluoro uridine
  modified_base 17: mod_base = OTHER; note = 2'O-methyl uridine
  modified_base 18: mod_base = OTHER; note = 2'-fluoro cytidine
  modified_base 19: mod_base = OTHER; note = 2'O-methyl uridine phosphorothioate
  modified_base 20: mod_base = OTHER; note = 2'O-methyl uridine phosphorothioate
  modified_base 21: mod_base = OTHER; note = 2'O-methyl uridine
ctgttgcagatgcccttcttt

SEQ ID NO: 1700 - RNA, 21 nt, synthetic construct
  source 1..21: mol_type = other RNA
  modified_base 1: mod_base = OTHER; note = 2'O-methyl guanosine phosphorothioate
  modified_base 2: mod_base = OTHER; note = 2'-fluoro guanosine phosphorothioate
  modified_base 3: mod_base = OTHER; note = 2'O-methyl cytidine
  modified_base 4: mod_base = OTHER; note = 2'-fluoro cytidine
  modified_base 5: mod_base = OTHER; note = 2'O-methyl uridine
  modified_base 6: mod_base = OTHER; note = 2'-fluoro guanosine
  modified_base 7: mod_base = OTHER; note = 2'O-methyl uridine
  modified_base 8: mod_base = OTHER; note = 2'-fluoro uridine
  modified_base 9: mod_base = OTHER; note = 2'O-methyl guanosine
  modified_base 10: mod_base = OTHER; note = 2'-fluoro cytidine
  modified_base 11: mod_base = OTHER; note = 2'O-methyl adenosine
  modified_base 12: mod_base = OTHER; note = 2'-fluoro guanosine
  modified_base 13: mod_base = OTHER; note = 2'O-methyl adenosine
  modified_base 14: mod_base = OTHER; note = 2'-fluoro uridine
  modified_base 15: mod_base = OTHER; note = 2'O-methyl guanosine
  modified_base 16: mod_base = OTHER; note = 2'-fluoro cytidine
  modified_base 17: mod_base = OTHER; note = 2'O-methyl cytidine
  modified_base 18: mod_base = OTHER; note = 2'-fluoro cytidine
  modified_base 19: mod_base = OTHER; note = 2'O-methyl uridine phosphorothioate
  modified_base 20: mod_base = OTHER; note = 2'O-methyl uridine phosphorothioate
  modified_base 21: mod_base = OTHER; note = 2'O-methyl uridine
ggcctgttgcagatgcccttt

SEQ ID NO: 1701 - RNA, 21 nt, synthetic construct
  source 1..21: mol_type = other RNA
  modified_base 1: mod_base = OTHER; note = 2'O-methyl uridine phosphorothioate
  modified_base 2: mod_base = OTHER; note = 2'-fluoro guanosine phosphorothioate
  modified_base 3: mod_base = OTHER; note = 2'O-methyl guanosine
  modified_base 4: mod_base = OTHER; note = 2'-fluoro guanosine
  modified_base 5: mod_base = OTHER; note = 2'O-methyl guanosine
  modified_base 6: mod_base = OTHER; note = 2'-fluoro cytidine
  modified_base 7: mod_base = OTHER; note = 2'O-methyl cytidine
  modified_base 8: mod_base = OTHER; note = 2'-fluoro uridine
  modified_base 9: mod_base = OTHER; note = 2'O-methyl guanosine
  modified_base 10: mod_base = OTHER; note = 2'-fluoro uridine
  modified_base 11: mod_base = OTHER; note = 2'O-methyl uridine
  modified_base 12: mod_base = OTHER; note = 2'-fluoro guanosine
  modified_base 13: mod_base = OTHER; note = 2'O-methyl cytidine
  modified_base 14: mod_base = OTHER; note = 2'-fluoro adenosine
  modified_base 15: mod_base = OTHER; note = 2'O-methyl guanosine
  modified_base 16: mod_base = OTHER; note = 2'-fluoro adenosine
  modified_base 17: mod_base = OTHER; note = 2'O-methyl uridine
  modified_base 18: mod_base = OTHER; note = 2'-fluoro guanosine
  modified_base 19: mod_base = OTHER; note = 2'O-methyl cytidine phosphorothioate
  modified_base 20: mod_base = OTHER; note = 2'O-methyl uridine phosphorothioate
  modified_base 21: mod_base = OTHER; note = 2'O-methyl uridine
tggggcctgttgcagatgctt

SEQ ID NO: 1702 - RNA, 21 nt, synthetic construct
  source 1..21: mol_type = other RNA
  modified_base 1: mod_base = OTHER; note = 2'O-methyl adenosine phosphorothioate
  modified_base 2: mod_base = OTHER; note = 2'-fluoro uridine phosphorothioate
  modified_base 3: mod_base = OTHER; note = 2'O-methyl uridine
  modified_base 4: mod_base = OTHER; note = 2'-fluoro uridine
  modified_base 5: mod_base = OTHER; note = 2'O-methyl cytidine
  modified_base 6: mod_base = OTHER; note = 2'-fluoro uridine
  modified_base 7: mod_base = OTHER; note = 2'O-methyl uridine
  modified_base 8: mod_base = OTHER; note = 2'-fluoro cytidine
  modified_base 9: mod_base = OTHER; note = 2'O-methyl adenosine
  modified_base 10: mod_base = OTHER; note = 2'-fluoro cytidine
  modified_base 11: mod_base = OTHER; note = 2'O-methyl uridine
  modified_base 12: mod_base = OTHER; note = 2'-fluoro cytidine
  modified_base 13: mod_base = OTHER; note = 2'O-methyl adenosine
  modified_base 14: mod_base = OTHER; note = 2'-fluoro guanosine
  modified_base 15: mod_base = OTHER; note = 2'O-methyl uridine
  modified_base 16: mod_base = OTHER; note = 2'-fluoro guanosine
  modified_base 17: mod_base = OTHER; note = 2'O-methyl cytidine
  modified_base 18: mod_base = OTHER; note = 2'-fluoro uridine
  modified_base 19: mod_base = OTHER; note = 2'O-methyl guanosine phosphorothioate
  modified_base 20: mod_base = OTHER; note = 2'O-methyl uridine phosphorothioate
  modified_base 21: mod_base = OTHER; note = 2'O-methyl uridine
atttcttcactcagtgctgtt

SEQ ID NO: 1703 - RNA, 21 nt, synthetic construct
  source 1..21: mol_type = other RNA
  modified_base 1: mod_base = OTHER; note = 2'O-methyl adenosine phosphorothioate
  modified_base 2: mod_base = OTHER; note = 2'-fluoro adenosine phosphorothioate
  modified_base 3: mod_base = OTHER; note = 2'O-methyl uridine
  modified_base 4: mod_base = OTHER; note = 2'-fluoro guanosine
  modified_base 5: mod_base = OTHER; note = 2'O-methyl guanosine
  modified_base 6: mod_base = OTHER; note = 2'-fluoro guanosine
  modified_base 7: mod_base = OTHER; note = 2'O-methyl uridine
  modified_base 8: mod_base = OTHER; note = 2'-fluoro adenosine
  modified_base 9: mod_base = OTHER; note = 2'O-methyl guanosine
  modified_base 10: mod_base = OTHER; note = 2'-fluoro cytidine
  modified_base 11: mod_base = OTHER; note = 2'O-methyl adenosine
  modified_base 12: mod_base = OTHER; note = 2'-fluoro adenosine
  modified_base 13: mod_base = OTHER; note = 2'O-methyl guanosine
  modified_base 14: mod_base = OTHER; note = 2'-fluoro uridine
  modified_base 15: mod_base = OTHER; note = 2'O-methyl uridine
  modified_base 16: mod_base = OTHER; note = 2'-fluoro guanosine
  modified_base 17: mod_base = OTHER; note = 2'O-methyl cytidine
  modified_base 18: mod_base = OTHER; note = 2'-fluoro adenosine
  modified_base 19: mod_base = OTHER; note = 2'O-methyl adenosine phosphorothioate
  modified_base 20: mod_base = OTHER; note = 2'O-methyl uridine phosphorothioate
  modified_base 21: mod_base = OTHER; note = 2'O-methyl uridine
aatgggtagcaagttgcaatt

SEQ ID NO: 1704 - RNA, 21 nt, synthetic construct
  source 1..21: mol_type = other RNA
  modified_base 1: mod_base = OTHER; note = 2'O-methyl cytidine phosphorothioate
  modified_base 2: mod_base = OTHER; note = 2'-fluoro adenosine phosphorothioate
  modified_base 3: mod_base = OTHER; note = 2'O-methyl uridine
  modified_base 4: mod_base = OTHER; note = 2'-fluoro uridine
  modified_base 5: mod_base = OTHER; note = 2'O-methyl adenosine
  modified_base 6: mod_base = OTHER; note = 2'-fluoro uridine
  modified_base 7: mod_base = OTHER; note = 2'O-methyl cytidine
  modified_base 8: mod_base = OTHER; note = 2'-fluoro cytidine
  modified_base 9: mod_base = OTHER; note = 2'O-methyl uridine
  modified_base 10: mod_base = OTHER; note = 2'-fluoro adenosine
  modified_base 11: mod_base = OTHER; note = 2'O-methyl adenosine
  modified_base 12: mod_base = OTHER; note = 2'-fluoro uridine
  modified_base 13: mod_base = OTHER; note = 2'O-methyl guanosine
  modified_base 14: mod_base = OTHER; note = 2'-fluoro guanosine
  modified_base 15: mod_base = OTHER; note = 2'O-methyl guanosine
  modified_base 16: mod_base = OTHER; note = 2'-fluoro uridine
  modified_base 17: mod_base = OTHER; note = 2'O-methyl adenosine
  modified_base 18: mod_base = OTHER; note = 2'-fluoro guanosine
  modified_base 19: mod_base = OTHER; note = 2'O-methyl cytidine phosphorothioate
  modified_base 20: mod_base = OTHER; note = 2'O-methyl uridine phosphorothioate
  modified_base 21: mod_base = OTHER; note = 2'O-methyl uridine
cattatcctaatgggtagctt

SEQ ID NO: 1705 - RNA, 21 nt, synthetic construct
  source 1..21: mol_type = other RNA
  modified_base 1: mod_base = OTHER; note = 2'O-methyl adenosine phosphorothioate
  modified_base 2: mod_base = OTHER; note = 2'-fluoro guanosine phosphorothioate
  modified_base 3: mod_base = OTHER; note = 2'O-methyl adenosine
  modified_base 4: mod_base = OTHER; note = 2'-fluoro cytidine
  modified_base 5: mod_base = OTHER; note = 2'O-methyl adenosine
  modified_base 6: mod_base = OTHER; note = 2'-fluoro uridine
  modified_base 7: mod_base = OTHER; note = 2'O-methyl uridine
  modified_base 8: mod_base = OTHER; note = 2'-fluoro adenosine
  modified_base 9: mod_base = OTHER; note = 2'O-methyl uridine
  modified_base 10: mod_base = OTHER; note = 2'-fluoro cytidine
  modified_base 11: mod_base = OTHER; note = 2'O-methyl cytidine
  modified_base 12: mod_base = OTHER; note = 2'-fluoro uridine
  modified_base 13: mod_base = OTHER; note = 2'O-methyl adenosine
  modified_base 14: mod_base = OTHER; note = 2'-fluoro adenosine
  modified_base 15: mod_base = OTHER; note = 2'O-methyl uridine
  modified_base 16: mod_base = OTHER; note = 2'-fluoro guanosine
  modified_base 17: mod_base = OTHER; note = 2'O-methyl guanosine
  modified_base 18: mod_base = OTHER; note = 2'-fluoro guanosine
  modified_base 19: mod_base = OTHER; note = 2'O-methyl uridine phosphorothioate
  modified_base 20: mod_base = OTHER; note = 2'O-methyl uridine phosphorothioate
  modified_base 21: mod_base = OTHER; note = 2'O-methyl uridine
agacattatcctaatgggttt

SEQ ID NO: 1706 - RNA, 21 nt, synthetic construct
  source 1..21: mol_type = other RNA
  modified_base 1: mod_base = OTHER; note = 2'O-methyl adenosine phosphorothioate
  modified_base 2: mod_base = OTHER; note = 2'-fluoro adenosine phosphorothioate
  modified_base 3: mod_base = OTHER; note = 2'O-methyl guanosine
  modified_base 4: mod_base = OTHER; note = 2'-fluoro adenosine
  modified_base 5: mod_base = OTHER; note = 2'O-methyl cytidine
  modified_base 6: mod_base = OTHER; note = 2'-fluoro adenosine
  modified_base 7: mod_base = OTHER; note = 2'O-methyl uridine
  modified_base 8: mod_base = OTHER; note = 2'-fluoro uridine
  modified_base 9: mod_base = OTHER; note = 2'O-methyl adenosine
  modified_base 10: mod_base = OTHER; note = 2'-fluoro uridine
  modified_base 11: mod_base = OTHER; note = 2'O-methyl cytidine
  modified_base 12: mod_base = OTHER; note = 2'-fluoro cytidine
  modified_base 13: mod_base = OTHER; note = 2'O-methyl uridine
  modified_base 14: mod_base = OTHER; note = 2'-fluoro adenosine
  modified_base 15: mod_base = OTHER; note = 2'O-methyl adenosine
  modified_base 16: mod_base = OTHER; note = 2'-fluoro uridine
  modified_base 17: mod_base = OTHER; note = 2'O-methyl guanosine
  modified_base 18: mod_base = OTHER; note = 2'-fluoro guanosine
  modified_base 19: mod_base = OTHER; note = 2'O-methyl guanosine phosphorothioate
  modified_base 20: mod_base = OTHER; note = 2'O-methyl uridine phosphorothioate
  modified_base 21: mod_base = OTHER; note = 2'O-methyl uridine
aagacattatcctaatgggtt

SEQ ID NO: 1707 - RNA, 21 nt, synthetic construct
  source 1..21: mol_type = other RNA
  modified_base 1: mod_base = OTHER; note = 2'O-methyl adenosine phosphorothioate
  modified_base 2: mod_base = OTHER; note = 2'-fluoro uridine phosphorothioate
  modified_base 3: mod_base = OTHER; note = 2'O-methyl adenosine
  modified_base 4: mod_base = OTHER; note = 2'-fluoro adenosine
  modified_base 5: mod_base = OTHER; note = 2'O-methyl guanosine
  modified_base 6: mod_base = OTHER; note = 2'-fluoro adenosine
  modified_base 7: mod_base = OTHER; note = 2'O-methyl cytidine
  modified_base 8: mod_base = OTHER; note = 2'-fluoro adenosine
  modified_base 9: mod_base = OTHER; note = 2'O-methyl uridine
  modified_base 10: mod_base = OTHER; note = 2'-fluoro uridine
  modified_base 11: mod_base = OTHER; note = 2'O-methyl adenosine
  modified_base 12: mod_base = OTHER; note = 2'-fluoro uridine
  modified_base 13: mod_base = OTHER; note = 2'O-methyl cytidine
  modified_base 14: mod_base = OTHER; note = 2'-fluoro cytidine
  modified_base 15: mod_base = OTHER; note = 2'O-methyl uridine
  modified_base 16: mod_base = OTHER; note = 2'-fluoro adenosine
  modified_base 17: mod_base = OTHER; note = 2'O-methyl adenosine
  modified_base 18: mod_base = OTHER; note = 2'-fluoro uridine
  modified_base 19: mod_base = OTHER; note = 2'O-methyl guanosine phosphorothioate
  modified_base 20: mod_base = OTHER; note = 2'O-methyl uridine phosphorothioate
  modified_base 21: mod_base = OTHER; note = 2'O-methyl uridine
ataagacattatcctaatgtt

SEQ ID NO: 1708 - RNA, 21 nt, synthetic construct
  source 1..21: mol_type = other RNA
  modified_base 1: mod_base = OTHER; note = 2'O-methyl guanosine phosphorothioate
  modified_base 2: mod_base = OTHER; note = 2'-fluoro guanosine phosphorothioate
  modified_base 3: mod_base = OTHER; note = 2'O-methyl cytidine
  modified_base 4: mod_base = OTHER; note = 2'-fluoro adenosine
  modified_base 5: mod_base = OTHER; note = 2'O-methyl guanosine
  modified_base 6: mod_base = OTHER; note = 2'-fluoro guanosine
  modified_base 7: mod_base = OTHER; note = 2'O-methyl guanosine
  modified_base 8: mod_base = OTHER; note = 2'-fluoro uridine
  modified_base 9: mod_base = OTHER; note = 2'O-methyl adenosine
  modified_base 10: mod_base = OTHER; note = 2'-fluoro cytidine
  modified_base 11: mod_base = OTHER; note = 2'O-methyl adenosine
  modified_base 12: mod_base = OTHER; note = 2'-fluoro guanosine
  modified_base 13: mod_base = OTHER; note = 2'O-methyl guanosine
  modified_base 14: mod_base = OTHER; note = 2'-fluoro guanosine
  modified_base 15: mod_base = OTHER; note = 2'O-methyl cytidine
  modified_base 16: mod_base = OTHER; note = 2'-fluoro adenosine
  modified_base 17: mod_base = OTHER; note = 2'O-methyl guanosine
  modified_base 18: mod_base = OTHER; note = 2'-fluoro cytidine
  modified_base 19: mod_base = OTHER; note = 2'O-methyl adenosine phosphorothioate
  modified_base 20: mod_base = OTHER; note = 2'O-methyl uridine phosphorothioate
  modified_base 21: mod_base = OTHER; note = 2'O-methyl uridine
ggcagggtacagggcagcatt

SEQ ID NO: 1709 - RNA, 21 nt, synthetic construct
  source 1..21: mol_type = other RNA
  modified_base 1: mod_base = OTHER; note = 2'O-methyl cytidine phosphorothioate
  modified_base 2: mod_base = OTHER; note = 2'-fluoro adenosine phosphorothioate
  modified_base 3: mod_base = OTHER; note = 2'O-methyl cytidine
  modified_base 4: mod_base = OTHER; note = 2'-fluoro adenosine
  modified_base 5: mod_base = OTHER; note = 2'O-methyl guanosine
  modified_base 6: mod_base = OTHER; note = 2'-fluoro guanosine
  modified_base 7: mod_base = OTHER; note = 2'O-methyl cytidine
  modified_base 8: mod_base = OTHER; note = 2'-fluoro adenosine
  modified_base 9: mod_base = OTHER; note = 2'O-methyl guanosine
  modified_base 10: mod_base = OTHER; note = 2'-fluoro guanosine
  modified_base 11: mod_base = OTHER; note = 2'O-methyl guanosine
  modified_base 12: mod_base = OTHER; note = 2'-fluoro uridine
  modified_base 13: mod_base = OTHER; note = 2'O-methyl adenosine
  modified_base 14: mod_base = OTHER; note = 2'-fluoro cytidine
  modified_base 15: mod_base = OTHER; note = 2'O-methyl adenosine
  modified_base 16: mod_base = OTHER; note = 2'-fluoro guanosine
  modified_base 17: mod_base = OTHER; note = 2'O-methyl guanosine
  modified_base 18: mod_base = OTHER; note = 2'-fluoro guanosine
  modified_base 19: mod_base = OTHER; note = 2'O-methyl cytidine phosphorothioate
  modified_base 20: mod_base = OTHER; note = 2'O-methyl uridine phosphorothioate
  modified_base 21: mod_base = OTHER; note = 2'O-methyl uridine
cacaggcagggtacagggctt

SEQ ID NO: 1710 - RNA, 21 nt, synthetic construct
  source 1..21: mol_type = other RNA
  modified_base 1: mod_base = OTHER; note = 2'O-methyl guanosine phosphorothioate
  modified_base 2: mod_base = OTHER; note = 2'-fluoro guanosine phosphorothioate
  modified_base 3: mod_base = OTHER; note = 2'O-methyl cytidine
  modified_base 4: mod_base = OTHER; note = 2'-fluoro adenosine
  modified_base 5: mod_base = OTHER; note = 2'O-methyl guanosine
  modified_base 6: mod_base = OTHER; note = 2'-fluoro adenosine
  modified_base 7: mod_base = OTHER; note = 2'O-methyl uridine
  modified_base 8: mod_base = OTHER; note = 2'-fluoro uridine
  modified_base 9: mod_base = OTHER; note = 2'O-methyl cytidine
  modified_base 10: mod_base = OTHER; note = 2'-fluoro cytidine
  modified_base 11: mod_base = OTHER; note = 2'O-methyl adenosine
  modified_base 12: mod_base = OTHER; note = 2'-fluoro cytidine
  modified_base 13: mod_base = OTHER; note = 2'O-methyl adenosine
  modified_base 14: mod_base = OTHER; note = 2'-fluoro guanosine
  modified_base 15: mod_base = OTHER; note = 2'O-methyl guanosine
  modified_base 16: mod_base = OTHER; note = 2'-fluoro cytidine
  modified_base 17: mod_base = OTHER; note = 2'O-methyl adenosine
  modified_base 18: mod_base = OTHER; note = 2'-fluoro guanosine
  modified_base 19: mod_base = OTHER; note = 2'O-methyl guanosine phosphorothioate
  modified_base 20: mod_base = OTHER; note = 2'O-methyl uridine phosphorothioate
  modified_base 21: mod_base = OTHER; note = 2'O-methyl uridine
ggcagattccacaggcaggtt

SEQ ID NO: 1711 - RNA, 21 nt, synthetic construct
  source 1..21: mol_type = other RNA
  modified_base 1: mod_base = OTHER; note = 2'O-methyl adenosine phosphorothioate
  modified_base 2: mod_base = OTHER; note = 2'-fluoro adenosine phosphorothioate
  modified_base 3: mod_base = OTHER; note = 2'O-methyl uridine
  modified_base 4: mod_base = OTHER; note = 2'-fluoro guanosine
  modified_base 5: mod_base = OTHER; note = 2'O-methyl guanosine
  modified_base 6: mod_base = OTHER; note = 2'-fluoro cytidine
  modified_base 7: mod_base = OTHER; note = 2'O-methyl adenosine
  modified_base 8: mod_base = OTHER; note = 2'-fluoro guanosine
  modified_base 9: mod_base = OTHER; note = 2'O-methyl adenosine
  modified_base 10: mod_base = OTHER; note = 2'-fluoro uridine
  modified_base 11: mod_base = OTHER; note = 2'O-methyl uridine
  modified_base 12: mod_base = OTHER; note = 2'-fluoro cytidine
  modified_base 13: mod_base = OTHER; note = 2'O-methyl cytidine
  modified_base 14: mod_base = OTHER; note = 2'-fluoro adenosine
  modified_base 15: mod_base = OTHER; note = 2'O-methyl cytidine
  modified_base 16: mod_base = OTHER; note = 2'-fluoro adenosine
  modified_base 17: mod_base = OTHER; note = 2'O-methyl guanosine
  modified_base 18: mod_base = OTHER; note = 2'-fluoro guanosine
  modified_base 19: mod_base = OTHER; note = 2'O-methyl cytidine phosphorothioate
  modified_base 20: mod_base = OTHER; note = 2'O-methyl uridine phosphorothioate
  modified_base 21: mod_base = OTHER; note = 2'O-methyl uridine
aatggcagattccacaggctt

SEQ ID NO: 1712 - RNA, 21 nt, synthetic construct
  source 1..21: mol_type = other RNA
  modified_base 1: mod_base = OTHER; note = 2'O-methyl guanosine phosphorothioate
  modified_base 2: mod_base = OTHER; note = 2'-fluoro adenosine phosphorothioate
  modified_base 3: mod_base = OTHER; note = 2'O-methyl adenosine
  modified_base 4: mod_base = OTHER; note = 2'-fluoro guanosine
  modified_base 5: mod_base = OTHER; note = 2'O-methyl cytidine
  modified_base 6: mod_base = OTHER; note = 2'-fluoro cytidine
  modified_base 7: mod_base = OTHER; note = 2'O-methyl adenosine
  modified_base 8: mod_base = OTHER; note = 2'-fluoro uridine
  modified_base 9: mod_base = OTHER; note = 2'O-methyl guanosine
  modified_base 10: mod_base = OTHER; note = 2'-fluoro uridine
  modified_base 11: mod_base = OTHER; note = 2'O-methyl cytidine
  modified_base 12: mod_base = OTHER; note = 2'-fluoro adenosine
  modified_base 13: mod_base = OTHER; note = 2'O-methyl cytidine
  modified_base 14: mod_base = OTHER; note = 2'-fluoro cytidine
  modified_base 15: mod_base = OTHER; note = 2'O-methyl adenosine
  modified_base 16: mod_base = OTHER; note = 2'-fluoro guanosine
  modified_base 17: mod_base = OTHER; note = 2'O-methyl uridine
  modified_base 18: mod_base = OTHER; note = 2'-fluoro cytidine
  modified_base 19: mod_base = OTHER; note = 2'O-methyl uridine phosphorothioate
  modified_base 20: mod_base = OTHER; note = 2'O-methyl uridine phosphorothioate
  modified_base 21: mod_base = OTHER; note = 2'O-methyl uridine
gaagccatgtcaccagtcttt

SEQ ID NO: 1713 - RNA, 21 nt, synthetic construct
  source 1..21: mol_type = other RNA
  modified_base 1: mod_base = OTHER; note = 2'O-methyl guanosine phosphorothioate
  modified_base 2: mod_base = OTHER; note = 2'-fluoro adenosine phosphorothioate
  modified_base 3: mod_base = OTHER; note = 2'O-methyl guanosine
  modified_base 4: mod_base = OTHER; note = 2'-fluoro guanosine
  modified_base 5: mod_base = OTHER; note = 2'O-methyl cytidine
  modified_base 6: mod_base = OTHER; note = 2'-fluoro guanosine
  modified_base 7: mod_base = OTHER; note = 2'O-methyl guanosine
  modified_base 8: mod_base = OTHER; note = 2'-fluoro guanosine
  modified_base 9: mod_base = OTHER; note = 2'O-methyl guanosine
  modified_base 10: mod_base = OTHER; note = 2'-fluoro adenosine
  modified_base 11: mod_base = OTHER; note = 2'O-methyl guanosine
  modified_base 12: mod_base = OTHER; note = 2'-fluoro cytidine
  modified_base 13: mod_base = OTHER; note = 2'O-methyl adenosine
  modified_base 14: mod_base = OTHER; note = 2'-fluoro guanosine
  modified_base 15: mod_base = OTHER; note = 2'O-methyl adenosine
  modified_base 16: mod_base = OTHER; note = 2'-fluoro cytidine
  modified_base 17: mod_base = OTHER; note = 2'O-methyl adenosine
  modified_base 18: mod_base = OTHER; note = 2'-fluoro cytidine
  modified_base 19: mod_base = OTHER; note = 2'O-methyl adenosine phosphorothioate
  modified_base 20: mod_base = OTHER; note = 2'O-methyl uridine phosphorothioate
  modified_base 21: mod_base = OTHER; note = 2'O-methyl uridine
gaggcggggagcagacacatt

SEQ ID NO: 1714 - RNA, 21 nt, synthetic construct
  source 1..21: mol_type = other RNA
  modified_base 1: mod_base = OTHER; note = 2'O-methyl uridine phosphorothioate
  modified_base 2: mod_base = OTHER; note = 2'-fluoro guanosine phosphorothioate
  modified_base 3: mod_base = OTHER; note = 2'O-methyl guanosine
  modified_base 4: mod_base = OTHER; note = 2'-fluoro adenosine
  modified_base 5: mod_base = OTHER; note = 2'O-methyl guanosine
  modified_base 6: mod_base = OTHER; note = 2'-fluoro guanosine
  modified_base 7: mod_base = OTHER; note = 2'O-methyl cytidine
  modified_base 8: mod_base = OTHER; note = 2'-fluoro guanosine
  modified_base 9: mod_base = OTHER; note = 2'O-methyl guanosine
  modified_base 10: mod_base = OTHER; note = 2'-fluoro guanosine
  modified_base 11: mod_base = OTHER; note = 2'O-methyl guanosine
  modified_base 12: mod_base = OTHER; note = 2'-fluoro adenosine
  modified_base 13: mod_base = OTHER; note = 2'O-methyl guanosine
  modified_base 14: mod_base = OTHER; note = 2'-fluoro cytidine
  modified_base 15: mod_base = OTHER; note = 2'O-methyl adenosine
  modified_base 16: mod_base = OTHER; note = 2'-fluoro guanosine
  modified_base 17: mod_base = OTHER; note = 2'O-methyl adenosine
  modified_base 18: mod_base = OTHER; note = 2'-fluoro cytidine
  modified_base 19: mod_base = OTHER; note = 2'O-methyl adenosine phosphorothioate
  modified_base 20: mod_base = OTHER; note = 2'O-methyl uridine phosphorothioate
  modified_base 21: mod_base = OTHER; note = 2'O-methyl uridine
tggaggcggggagcagacatt

SEQ ID NO: 1715 - RNA, 23 nt, synthetic construct
  source 1..23: mol_type = other RNA
  modified_base 1: mod_base = OTHER; note = 5' vinyl phosphonate 2'O-methyl guanosine phosphorothioate
  modified_base 2: mod_base = OTHER; note = 2'-fluoro cytidine phosphorothioate
  modified_base 3: mod_base = OTHER; note = 2'O-methyl cytidine
  modified_base 4: mod_base = OTHER; note = 2'-fluoro guanosine
  modified_base 5: mod_base = OTHER; note = 2'O-methyl cytidine
  modified_base 6: mod_base = OTHER; note = 2'-fluoro guanosine
  modified_base 7: mod_base = OTHER; note = 2'O-methyl cytidine
  modified_base 8: mod_base = OTHER; note = 2'-fluoro uridine
  modified_base 9: mod_base = OTHER; note = 2'O-methyl cytidine
  modified_base 10: mod_base = OTHER; note = 2'-fluoro uridine
  modified_base 11: mod_base = OTHER; note = 2'O-methyl guanosine
  modified_base 12: mod_base = OTHER; note = 2'-fluoro cytidine
  modified_base 13: mod_base = OTHER; note = 2'O-methyl guanosine
  modified_base 14: mod_base = OTHER; note = 2'-fluoro uridine
  modified_base 15: mod_base = OTHER; note = 2'O-methyl cytidine
  modified_base 16: mod_base = OTHER; note = 2'-fluoro guanosine
  modified_base 17: mod_base = OTHER; note = 2'O-methyl uridine
  modified_base 18: mod_base = OTHER; note = 2'-fluoro adenosine
  modified_base 19: mod_base = OTHER; note = 2'O-methyl cytidine
  modified_base 20: mod_base = OTHER; note = 2'-fluoro adenosine
  modified_base 21: mod_base = OTHER; note = 2'O-methyl uridine phosphorothioate
  modified_base 22: mod_base = OTHER; note = 2'O-methyl uridine phosphorothioate
  modified_base 23: mod_base = OTHER; note = 2'O-methyl uridine
gccgcgctctgcgtcgtacattt

SEQ ID NO: 1716 - RNA, 23 nt, synthetic construct
  source 1..23: mol_type = other RNA
  modified_base 1: mod_base = OTHER; note = 5' vinyl phosphonate 2'O-methyl cytidine phosphorothioate
  modified_base 2: mod_base = OTHER; note = 2'-fluoro adenosine phosphorothioate
  modified_base 3: mod_base = OTHER; note = 2'O-methyl guanosine
  modified_base 4: mod_base = OTHER; note = 2'-fluoro cytidine
  modified_base 5: mod_base = OTHER; note = 2'O-methyl cytidine
  modified_base 6: mod_base = OTHER; note = 2'-fluoro guanosine
  modified_base 7: mod_base = OTHER; note = 2'O-methyl cytidine
  modified_base 8: mod_base = OTHER; note = 2'-fluoro guanosine
  modified_base 9: mod_base = OTHER; note = 2'O-methyl cytidine
  modified_base 10: mod_base = OTHER; note = 2'-fluoro uridine
  modified_base 11: mod_base = OTHER; note = 2'O-methyl cytidine
  modified_base 12: mod_base = OTHER; note = 2'-fluoro uridine
  modified_base 13: mod_base = OTHER; note = 2'O-methyl guanosine
  modified_base 14: mod_base = OTHER; note = 2'-fluoro cytidine
  modified_base 15: mod_base = OTHER; note = 2'O-methyl guanosine
  modified_base 16: mod_base = OTHER; note = 2'-fluoro uridine
  modified_base 17: mod_base = OTHER; note = 2'O-methyl cytidine
  modified_base 18: mod_base = OTHER; note = 2'-fluoro guanosine
  modified_base 19: mod_base = OTHER; note = 2'O-methyl uridine
  modified_base 20: mod_base = OTHER; note = 2'-fluoro adenosine
  modified_base 21: mod_base = OTHER; note = 2'O-methyl cytidine phosphorothioate
  modified_base 22: mod_base = OTHER; note = 2'O-methyl uridine phosphorothioate
  modified_base 23: mod_base = OTHER; note = 2'O-methyl uridine
cagccgcgctctgcgtcgtactt

SEQ ID NO: 1717 - RNA, 23 nt, synthetic construct
  source 1..23: mol_type = other RNA
  modified_base 1: mod_base = OTHER; note = 5' vinyl phosphonate 2'O-methyl cytidine phosphorothioate
  modified_base 2: mod_base = OTHER; note = 2'-fluoro cytidine phosphorothioate
  modified_base 3: mod_base = OTHER; note = 2'O-methyl adenosine
  modified_base 4: mod_base = OTHER; note = 2'-fluoro guanosine
  modified_base 5: mod_base = OTHER; note = 2'O-methyl cytidine
  modified_base 6: mod_base = OTHER; note = 2'-fluoro cytidine
  modified_base 7: mod_base = OTHER; note = 2'O-methyl guanosine
  modified_base 8: mod_base = OTHER; note = 2'-fluoro cytidine
  modified_base 9: mod_base = OTHER; note = 2'O-methyl guanosine
  modified_base 10: mod_base = OTHER; note = 2'-fluoro cytidine
  modified_base 11: mod_base = OTHER; note = 2'O-methyl uridine
  modified_base 12: mod_base = OTHER; note = 2'-fluoro cytidine
  modified_base 13: mod_base = OTHER; note = 2'O-methyl uridine
  modified_base 14: mod_base = OTHER; note = 2'-fluoro guanosine
  modified_base 15: mod_base = OTHER; note = 2'O-methyl cytidine
  modified_base 16: mod_base = OTHER; note = 2'-fluoro guanosine
  modified_base 17: mod_base = OTHER; note = 2'O-methyl uridine
  modified_base 18: mod_base = OTHER; note = 2'-fluoro cytidine
  modified_base 19: mod_base = OTHER; note = 2'O-methyl guanosine
  modified_base 20: mod_base = OTHER; note = 2'-fluoro uridine
  modified_base 21: mod_base = OTHER; note = 2'O-methyl adenosine phosphorothioate
  modified_base 22: mod_base = OTHER; note = 2'O-methyl uridine phosphorothioate
  modified_base 23: mod_base = OTHER; note = 2'O-methyl uridine
ccagccgcgctctgcgtcgtatt

SEQ ID NO: 1718 - RNA, 23 nt, synthetic construct
  source 1..23: mol_type = other RNA
  modified_base 1: mod_base = OTHER; note = 5' vinyl phosphonate 2'O-methyl uridine phosphorothioate
  modified_base 2: mod_base = OTHER; note = 2'-fluoro cytidine phosphorothioate
  modified_base 3: mod_base = OTHER; note = 2'O-methyl cytidine
  modified_base 4: mod_base = OTHER; note = 2'-fluoro adenosine
  modified_base 5: mod_base = OTHER; note = 2'O-methyl guanosine
  modified_base 6: mod_base = OTHER; note = 2'-fluoro cytidine
  modified_base 7: mod_base = OTHER; note = 2'O-methyl cytidine
  modified_base 8: mod_base = OTHER; note = 2'-fluoro guanosine
  modified_base 9: mod_base = OTHER; note = 2'O-methyl cytidine
  modified_base 10: mod_base = OTHER; note = 2'-fluoro guanosine
  modified_base 11: mod_base = OTHER; note = 2'O-methyl cytidine
  modified_base 12: mod_base = OTHER; note = 2'-fluoro uridine
  modified_base 13: mod_base = OTHER; note = 2'O-methyl cytidine
  modified_base 14: mod_base = OTHER; note = 2'-fluoro uridine
  modified_base 15: mod_base = OTHER; note = 2'O-methyl guanosine
  modified_base 16: mod_base = OTHER; note = 2'-fluoro cytidine
  modified_base 17: mod_base = OTHER; note = 2'O-methyl guanosine
  modified_base 18: mod_base = OTHER; note = 2'-fluoro uridine
  modified_base 19: mod_base = OTHER; note = 2'O-methyl cytidine
  modified_base 20: mod_base = OTHER; note = 2'-fluoro guanosine
  modified_base 21: mod_base = OTHER; note = 2'O-methyl uridine phosphorothioate
  modified_base 22: mod_base = OTHER; note = 2'O-methyl uridine phosphorothioate
  modified_base 23: mod_base = OTHER; note = 2'O-methyl uridine
tccagccgcgctctgcgtcgttt

SEQ ID NO: 1719 - RNA, 23 nt, synthetic construct
  source 1..23: mol_type = other RNA
  modified_base 1: mod_base = OTHER; note = 5' vinyl phosphonate 2'O-methyl adenosine phosphorothioate
  modified_base 2: mod_base = OTHER; note = 2'-fluoro guanosine phosphorothioate
  modified_base 3: mod_base = OTHER; note = 2'O-methyl cytidine
  modified_base 4: mod_base = OTHER; note = 2'-fluoro uridine
  modified_base 5: mod_base = OTHER; note = 2'O-methyl cytidine
  modified_base 6: mod_base = OTHER; note = 2'-fluoro cytidine
  modified_base 7: mod_base = OTHER; note = 2'O-methyl adenosine
  modified_base 8: mod_base = OTHER; note = 2'-fluoro guanosine
  modified_base 9: mod_base = OTHER; note = 2'O-methyl cytidine
  modified_base 10: mod_base = OTHER; note = 2'-fluoro cytidine
  modified_base 11: mod_base = OTHER; note = 2'O-methyl guanosine
  modified_base 12: mod_base = OTHER; note = 2'-fluoro cytidine
  modified_base 13: mod_base = OTHER; note = 2'O-methyl guanosine
  modified_base 14: mod_base = OTHER; note = 2'-fluoro cytidine
  modified_base 15: mod_base = OTHER; note = 2'O-methyl uridine
  modified_base 16: mod_base = OTHER; note = 2'-fluoro cytidine
  modified_base 17: mod_base = OTHER; note = 2'O-methyl uridine
  modified_base 18: mod_base = OTHER; note = 2'-fluoro guanosine
  modified_base 19: mod_base = OTHER; note = 2'O-methyl cytidine
  modified_base 20: mod_base = OTHER; note = 2'-fluoro guanosine
  modified_base 21: mod_base = OTHER; note = 2'O-methyl uridine phosphorothioate
  modified_base 22: mod_base = OTHER; note = 2'O-methyl uridine phosphorothioate
  modified_base 23: mod_base = OTHER; note = 2'O-methyl uridine
agctccagccgcgctctgcgttt

SEQ ID NO: 1720 - RNA, 23 nt, synthetic construct
  source 1..23: mol_type = other RNA
  modified_base 1: mod_base = OTHER; note = 5' vinyl phosphonate 2'O-methyl adenosine phosphorothioate
  modified_base 2: mod_base = OTHER; note = 2'-fluoro adenosine phosphorothioate
  modified_base 3: mod_base = OTHER; note = 2'O-methyl guanosine
  modified_base 4: mod_base = OTHER; note = 2'-fluoro cytidine
  modified_base 5: mod_base = OTHER; note = 2'O-methyl uridine
  modified_base 6: mod_base = OTHER; note = 2'-fluoro cytidine
  modified_base 7: mod_base = OTHER; note = 2'O-methyl cytidine
  modified_base 8: mod_base = OTHER; note = 2'-fluoro adenosine
  modified_base 9: mod_base = OTHER; note = 2'O-methyl guanosine
  modified_base 10: mod_base = OTHER; note = 2'-fluoro cytidine
  modified_base 11: mod_base = OTHER; note = 2'O-methyl cytidine
  modified_base 12: mod_base = OTHER; note = 2'-fluoro guanosine
  modified_base 13: mod_base = OTHER; note = 2'O-methyl cytidine
  modified_base 14: mod_base = OTHER; note = 2'-fluoro guanosine
  modified_base 15: mod_base = OTHER; note = 2'O-methyl cytidine
  modified_base 16: mod_base = OTHER; note = 2'-fluoro uridine
  modified_base 17: mod_base = OTHER; note = 2'O-methyl cytidine
  modified_base 18: mod_base = OTHER; note = 2'-fluoro uridine
  modified_base 19: mod_base = OTHER; note = 2'O-methyl guanosine
  modified_base 20: mod_base = OTHER; note = 2'-fluoro cytidine
  modified_base 21: mod_base = OTHER; note = 2'O-methyl guanosine phosphorothioate
  modified_base 22: mod_base = OTHER; note = 2'O-methyl uridine phosphorothioate
  modified_base 23: mod_base = OTHER; note = 2'O-methyl uridine
aagctccagccgcgctctgcgtt

SEQ ID NO: 1721 - RNA, 23 nt, synthetic construct
  source 1..23: mol_type = other RNA
  modified_base 1: mod_base = OTHER; note = 5' vinyl phosphonate 2'O-methyl cytidine phosphorothioate
  modified_base 2: mod_base = OTHER; note = 2'-fluoro adenosine phosphorothioate
  modified_base 3: mod_base = OTHER; note = 2'O-methyl adenosine
  modified_base 4: mod_base = OTHER; note = 2'-fluoro guanosine
  modified_base 5: mod_base = OTHER; note = 2'O-methyl cytidine
  modified_base 6: mod_base = OTHER; note = 2'-fluoro uridine
  modified_base 7: mod_base = OTHER; note = 2'O-methyl cytidine
  modified_base 8: mod_base = OTHER; note = 2'-fluoro cytidine
  modified_base 9: mod_base = OTHER; note = 2'O-methyl adenosine
  modified_base 10: mod_base = OTHER; note = 2'-fluoro guanosine
  modified_base 11: mod_base = OTHER; note = 2'O-methyl cytidine
  modified_base 12: mod_base = OTHER; note = 2'-fluoro cytidine
  modified_base 13: mod_base = OTHER; note = 2'O-methyl guanosine
  modified_base 14: mod_base = OTHER; note = 2'-fluoro cytidine
  modified_base 15: mod_base = OTHER; note = 2'O-methyl guanosine
  modified_base 16: mod_base = OTHER; note = 2'-fluoro cytidine
  modified_base 17: mod_base = OTHER; note = 2'O-methyl uridine
  modified_base 18: mod_base = OTHER; note = 2'-fluoro cytidine
  modified_base 19: mod_base = OTHER; note = 2'O-methyl uridine
  modified_base 20: mod_base = OTHER; note = 2'-fluoro guanosine
  modified_base 21: mod_base = OTHER; note = 2'O-methyl cytidine phosphorothioate
  modified_base 22: mod_base = OTHER; note = 2'O-methyl uridine phosphorothioate
  modified_base 23: mod_base = OTHER; note = 2'O-methyl uridine
caagctccagccgcgctctgctt

SEQ ID NO: 1722 - RNA, 23 nt, synthetic construct
  source 1..23: mol_type = other RNA
  modified_base 1: mod_base = OTHER; note = 5' vinyl phosphonate 2'O-methyl adenosine phosphorothioate
  modified_base 2: mod_base = OTHER; note = 2'-fluoro cytidine phosphorothioate
  modified_base 3: mod_base = OTHER; note = 2'O-methyl adenosine
  modified_base 4: mod_base = OTHER; note = 2'-fluoro adenosine
  modified_base 5: mod_base = OTHER; note = 2'O-methyl guanosine
  modified_base 6: mod_base = OTHER; note = 2'-fluoro cytidine
  modified_base 7: mod_base = OTHER; note = 2'O-methyl uridine
  modified_base 8: mod_base = OTHER; note = 2'-fluoro cytidine
  modified_base 9: mod_base = OTHER; note = 2'O-methyl cytidine
  modified_base 10: mod_base = OTHER; note = 2'-fluoro adenosine
  modified_base 11: mod_base = OTHER; note = 2'O-methyl guanosine
  modified_base 12: mod_base = OTHER; note = 2'-fluoro cytidine
  modified_base 13: mod_base = OTHER; note = 2'O-methyl cytidine
  modified_base 14: mod_base = OTHER; note = 2'-fluoro guanosine
  modified_base 15: mod_base = OTHER; note = 2'O-methyl cytidine
  modified_base 16: mod_base = OTHER; note = 2'-fluoro guanosine
  modified_base 17: mod_base = OTHER; note = 2'O-methyl cytidine
  modified_base 18: mod_base = OTHER; note = 2'-fluoro uridine
  modified_base 19: mod_base = OTHER; note = 2'O-methyl cytidine
  modified_base 20: mod_base = OTHER; note = 2'-fluoro uridine
  modified_base 21: mod_base = OTHER; note = 2'O-methyl guanosine phosphorothioate
  modified_base 22: mod_base = OTHER; note = 2'O-methyl uridine phosphorothioate
  modified_base 23: mod_base = OTHER; note = 2'O-methyl uridine
acaagctccagccgcgctctgtt

SEQ ID NO: 1723 - RNA, 23 nt, synthetic construct
  source 1..23: mol_type = other RNA
  modified_base 1: mod_base = OTHER; note = 5' vinyl phosphonate 2'O-methyl guanosine phosphorothioate
  modified_base 2: mod_base = OTHER; note = 2'-fluoro adenosine phosphorothioate
  modified_base 3: mod_base = OTHER; note = 2'O-methyl cytidine
  modified_base 4: mod_base = OTHER; note = 2'-fluoro adenosine
  modified_base 5: mod_base = OTHER; note = 2'O-methyl adenosine
  modified_base 6: mod_base = OTHER; note = 2'-fluoro guanosine
  modified_base 7: mod_base = OTHER; note = 2'O-methyl cytidine
  modified_base 8: mod_base = OTHER; note = 2'-fluoro uridine
  modified_base 9: mod_base = OTHER; note = 2'O-methyl cytidine
  modified_base 10: mod_base = OTHER; note = 2'-fluoro cytidine
  modified_base 11: mod_base = OTHER; note = 2'O-methyl adenosine
  modified_base 12: mod_base = OTHER; note = 2'-fluoro guanosine
  modified_base 13: mod_base = OTHER; note = 2'O-methyl cytidine
  modified_base 14: mod_base = OTHER; note = 2'-fluoro cytidine
  modified_base 15: mod_base = OTHER; note = 2'O-methyl guanosine
  modified_base 16: mod_base = OTHER; note = 2'-fluoro cytidine
  modified_base 17: mod_base = OTHER; note = 2'O-methyl guanosine
  modified_base 18: mod_base = OTHER; note = 2'-fluoro cytidine
  modified_base 19: mod_base = OTHER; note = 2'O-methyl uridine
  modified_base 20: mod_base = OTHER; note = 2'-fluoro cytidine
  modified_base 21: mod_base = OTHER; note = 2'O-methyl uridine phosphorothioate
  modified_base 22: mod_base = OTHER; note = 2'O-methyl uridine phosphorothioate
  modified_base 23: mod_base = OTHER; note = 2'O-methyl uridine
gacaagctccagccgcgctcttt

SEQ ID NO: 1724 - RNA, 23 nt, synthetic construct
  source 1..23: mol_type = other RNA
  modified_base 1: mod_base = OTHER; note = 5' vinyl phosphonate 2'O-methyl guanosine phosphorothioate
  modified_base 2: mod_base = OTHER; note = 2'-fluoro guanosine phosphorothioate
  modified_base 3: mod_base = OTHER; note = 2'O-methyl adenosine
  modified_base 4: mod_base = OTHER; note = 2'-fluoro cytidine
  modified_base 5: mod_base = OTHER; note = 2'O-methyl adenosine
  modified_base 6: mod_base = OTHER; note = 2'-fluoro adenosine
  modified_base 7: mod_base = OTHER; note = 2'O-methyl guanosine
  modified_base 8: mod_base = OTHER; note = 2'-fluoro cytidine
  modified_base 9: mod_base = OTHER; note = 2'O-methyl uridine
  modified_base 10: mod_base = OTHER; note = 2'-fluoro cytidine
  modified_base 11: mod_base = OTHER; note = 2'O-methyl cytidine
  modified_base 12: mod_base = OTHER; note = 2'-fluoro adenosine
  modified_base 13: mod_base = OTHER; note = 2'O-methyl guanosine
  modified_base 14: mod_base = OTHER; note = 2'-fluoro cytidine
  modified_base 15: mod_base = OTHER; note = 2'O-methyl cytidine
  modified_base 16: mod_base = OTHER; note = 2'-fluoro guanosine
  modified_base 17: mod_base = OTHER; note = 2'O-methyl cytidine
  modified_base 18: mod_base = OTHER; note = 2'-fluoro guanosine
  modified_base 19: mod_base = OTHER; note = 2'O-methyl cytidine
  modified_base 20: mod_base = OTHER; note = 2'-fluoro uridine
  modified_base 21: mod_base = OTHER; note = 2'O-methyl cytidine phosphorothioate
  modified_base 22: mod_base = OTHER; note = 2'O-methyl uridine phosphorothioate
  modified_base 23: mod_base = OTHER; note = 2'O-methyl uridine
ggacaagctccagccgcgctctt

SEQ ID NO: 1725 - RNA, 23 nt, synthetic construct
  source 1..23: mol_type = other RNA
  modified_base 1: mod_base = OTHER; note = 5' vinyl phosphonate 2'O-methyl adenosine phosphorothioate
  modified_base 2: mod_base = OTHER; note = 2'-fluoro adenosine phosphorothioate
  modified_base 3: mod_base = OTHER; note = 2'O-methyl guanosine
  modified_base 4: mod_base = OTHER; note = 2'-fluoro guanosine
  modified_base 5: mod_base = OTHER; note = 2'O-methyl adenosine
  modified_base 6: mod_base = OTHER; note = 2'-fluoro cytidine
  modified_base 7: mod_base = OTHER; note = 2'O-methyl adenosine
  modified_base 8: mod_base = OTHER; note = 2'-fluoro adenosine
  modified_base 9: mod_base = OTHER; note = 2'O-methyl guanosine
  modified_base 10: mod_base = OTHER; note = 2'-fluoro cytidine
  modified_base 11: mod_base = OTHER; note = 2'O-methyl uridine
  modified_base 12: mod_base = OTHER; note = 2'-fluoro cytidine
  modified_base 13: mod_base = OTHER; note = 2'O-methyl cytidine
  modified_base 14: mod_base = OTHER; note = 2'-fluoro adenosine
  modified_base 15: mod_base = OTHER; note = 2'O-methyl guanosine
  modified_base 16: mod_base = OTHER; note = 2'-fluoro cytidine
  modified_base 17: mod_base = OTHER; note = 2'O-methyl cytidine
  modified_base 18: mod_base = OTHER; note = 2'-fluoro guanosine
  modified_base 19: mod_base = OTHER; note = 2'O-methyl cytidine
  modified_base 20: mod_base = OTHER; note = 2'-fluoro guanosine
  modified_base 21: mod_base = OTHER; note = 2'O-methyl cytidine phosphorothioate
  modified_base 22: mod_base = OTHER; note = 2'O-methyl uridine phosphorothioate
  modified_base 23: mod_base = OTHER; note = 2'O-methyl uridine
aaggacaagctccagccgcgctt

SEQ ID NO: 1726 - RNA, 23 nt, synthetic construct
  source 1..23: mol_type = other RNA
  modified_base 1: mod_base = OTHER; note = 5' vinyl phosphonate 2'O-methyl cytidine phosphorothioate
  modified_base 2: mod_base = OTHER; note = 2'-fluoro guanosine phosphorothioate
  modified_base 3: mod_base = OTHER; note = 2'O-methyl adenosine
  modified_base 4: mod_base = OTHER; note = 2'-fluoro adenosine
  modified_base 5: mod_base = OTHER; note = 2'O-methyl guanosine
  modified_base 6: mod_base = OTHER; note = 2'-fluoro guanosine
  modified_base 7: mod_base = OTHER; note = 2'O-methyl adenosine
  modified_base 8: mod_base = OTHER; note = 2'-fluoro cytidine
  modified_base 9: mod_base = OTHER; note = 2'O-methyl adenosine
  modified_base 10: mod_base = OTHER; note = 2'-fluoro adenosine
  modified_base 11: mod_base = OTHER; note = 2'O-methyl guanosine
  modified_base 12: mod_base = OTHER; note = 2'-fluoro cytidine
  modified_base 13: mod_base = OTHER; note = 2'O-methyl uridine
  modified_base 14: mod_base = OTHER; note = 2'-fluoro cytidine
  modified_base 15: mod_base = OTHER; note = 2'O-methyl cytidine
  modified_base 16: mod_base = OTHER; note = 2'-fluoro adenosine
  modified_base 17: mod_base = OTHER; note = 2'O-methyl guanosine
  modified_base 18: mod_base = OTHER; note = 2'-fluoro cytidine
  modified_base 19: mod_base = OTHER; note = 2'O-methyl cytidine
  modified_base 20: mod_base = OTHER; note = 2'-fluoro guanosine
  modified_base 21: mod_base = OTHER; note = 2'O-methyl cytidine phosphorothioate
  modified_base 22: mod_base = OTHER; note = 2'O-methyl uridine phosphorothioate
  modified_base 23: mod_base = OTHER; note = 2'O-methyl uridine
cgaaggacaagctccagccgctt

SEQ ID NO: 1727 - RNA, 23 nt, synthetic construct
  source 1..23: mol_type = other RNA
  modified_base 1: mod_base = OTHER; note = 5' vinyl phosphonate 2'O-methyl cytidine phosphorothioate
  modified_base 2: mod_base = OTHER; note = 2'-fluoro cytidine phosphorothioate
  modified_base 3: mod_base = OTHER; note = 2'O-methyl guanosine
  modified_base 4: mod_base = OTHER; note = 2'-fluoro cytidine
  modified_base 5: mod_base = OTHER; note = 2'O-methyl guanosine
  modified_base 6: mod_base = OTHER; note = 2'-fluoro adenosine
  modified_base 7: mod_base = OTHER; note = 2'O-methyl adenosine
  modified_base 8: mod_base = OTHER; note = 2'-fluoro guanosine
  modified_base 9: mod_base = OTHER; note = 2'O-methyl guanosine
  modified_base 10: mod_base = OTHER; note = 2'-fluoro adenosine
  modified_base 11: mod_base = OTHER; note = 2'O-methyl cytidine
  modified_base 12: mod_base = OTHER; note = 2'-fluoro adenosine
  modified_base 13: mod_base = OTHER; note = 2'O-methyl adenosine
  modified_base 14: mod_base = OTHER; note = 2'-fluoro guanosine
  modified_base 15: mod_base = OTHER; note = 2'O-methyl cytidine
  modified_base 16: mod_base = OTHER; note = 2'-fluoro uridine
  modified_base 17: mod_base = OTHER; note = 2'O-methyl cytidine
  modified_base 18: mod_base = OTHER; note = 2'-fluoro cytidine
  modified_base 19: mod_base = OTHER; note = 2'O-methyl adenosine
  modified_base 20: mod_base = OTHER; note = 2'-fluoro guanosine
  modified_base 21: mod_base = OTHER; note = 2'O-methyl cytidine phosphorothioate
  modified_base 22: mod_base = OTHER; note = 2'O-methyl uridine phosphorothioate
  modified_base 23: mod_base = OTHER; note = 2'O-methyl uridine
ccgcgaaggacaagctccagctt

SEQ ID NO: 1728 - RNA, 23 nt, synthetic construct
  source 1..23: mol_type = other RNA
  modified_base 1: mod_base = OTHER; note = 5' vinyl phosphonate 2'O-methyl guanosine phosphorothioate
  modified_base 2: mod_base = OTHER; note = 2'-fluoro cytidine phosphorothioate
  modified_base 3: mod_base = OTHER; note = 2'O-methyl cytidine
  modified_base 4: mod_base = OTHER; note = 2'-fluoro cytidine
  modified_base 5: mod_base = OTHER; note = 2'O-methyl guanosine
  modified_base 6: mod_base = OTHER; note = 2'-fluoro cytidine
  modified_base 7: mod_base = OTHER; note = 2'O-methyl guanosine
  modified_base 8: mod_base = OTHER; note = 2'-fluoro adenosine
  modified_base 9: mod_base = OTHER; note = 2'O-methyl adenosine
  modified_base 10: mod_base = OTHER; note = 2'-fluoro guanosine
  modified_base 11: mod_base = OTHER; note = 2'O-methyl guanosine
  modified_base 12: mod_base = OTHER; note = 2'-fluoro adenosine
  modified_base 13: mod_base = OTHER; note = 2'O-methyl cytidine
  modified_base 14: mod_base = OTHER; note = 2'-fluoro adenosine
  modified_base 15: mod_base = OTHER; note = 2'O-methyl adenosine
  modified_base 16: mod_base = OTHER; note = 2'-fluoro guanosine
  modified_base 17: mod_base = OTHER; note = 2'O-methyl cytidine
  modified_base 18: mod_base = OTHER; note = 2'-fluoro uridine
  modified_base 19: mod_base = OTHER; note = 2'O-methyl cytidine
  modified_base 20: mod_base = OTHER; note = 2'-fluoro cytidine
  modified_base 21: mod_base = OTHER; note = 2'O-methyl adenosine phosphorothioate
  modified_base 22: mod_base = OTHER; note = 2'O-methyl uridine phosphorothioate
  modified_base 23: mod_base = OTHER; note = 2'O-methyl uridine
gcccgcgaaggacaagctccatt

SEQ ID NO: 1729 - RNA, 23 nt, synthetic construct
  source 1..23: mol_type = other RNA
  modified_base 1: mod_base = OTHER; note = 5' vinyl phosphonate 2'O-methyl adenosine phosphorothioate
  modified_base 2: mod_base = OTHER; note = 2'-fluoro guanosine phosphorothioate
  modified_base 3: mod_base = OTHER; note = 2'O-methyl cytidine
  modified_base 4: mod_base = OTHER; note = 2'-fluoro cytidine
  modified_base 5: mod_base = OTHER; note = 2'O-methyl cytidine
  modified_base 6: mod_base = OTHER; note = 2'-fluoro guanosine
  modified_base 7: mod_base = OTHER; note = 2'O-methyl cytidine
  modified_base 8: mod_base = OTHER; note = 2'-fluoro guanosine
  modified_base 9: mod_base = OTHER; note = 2'O-methyl adenosine
  modified_base 10: mod_base = OTHER; note = 2'-fluoro adenosine
  modified_base 11: mod_base = OTHER; note = 2'O-methyl guanosine
  modified_base 12: mod_base = OTHER; note = 2'-fluoro guanosine
  modified_base 13: mod_base = OTHER; note = 2'O-methyl adenosine
  modified_base 14: mod_base = OTHER; note = 2'-fluoro cytidine
  modified_base 15: mod_base = OTHER; note = 2'O-methyl adenosine
  modified_base 16: mod_base = OTHER; note = 2'-fluoro adenosine
  modified_base 17: mod_base = OTHER; note = 2'O-methyl guanosine
  modified_base 18: mod_base = OTHER; note = 2'-fluoro cytidine
  modified_base 19: mod_base = OTHER; note = 2'O-methyl uridine
  modified_base 20: mod_base = OTHER; note = 2'-fluoro cytidine
  modified_base 21: mod_base = OTHER; note = 2'O-methyl cytidine phosphorothioate
  modified_base 22: mod_base = OTHER; note = 2'O-methyl uridine phosphorothioate
  modified_base 23: mod_base = OTHER; note = 2'O-methyl uridine
agcccgcgaaggacaagctcctt

SEQ ID NO: 1730 - RNA, 23 nt, synthetic construct
  source 1..23: mol_type = other RNA
  modified_base 1: mod_base = OTHER; note = 5' vinyl phosphonate 2'O-methyl cytidine phosphorothioate
  modified_base 2: mod_base = OTHER; note = 2'-fluoro adenosine phosphorothioate
  modified_base 3: mod_base = OTHER; note = 2'O-methyl guanosine
  modified_base 4: mod_base = OTHER; note = 2'-fluoro cytidine
  modified_base 5: mod_base = OTHER; note = 2'O-methyl cytidine
  modified_base 6: mod_base = OTHER; note = 2'-fluoro cytidine
  modified_base 7: mod_base = OTHER; note = 2'O-methyl guanosine
  modified_base 8: mod_base = OTHER; note = 2'-fluoro cytidine
  modified_base 9: mod_base = OTHER; note = 2'O-methyl guanosine
  modified_base 10: mod_base = OTHER; note = 2'-fluoro adenosine
  modified_base 11: mod_base = OTHER; note = 2'O-methyl adenosine
  modified_base 12: mod_base = OTHER; note = 2'-fluoro guanosine
  modified_base 13: mod_base = OTHER; note = 2'O-methyl guanosine
  modified_base 14: mod_base = OTHER; note = 2'-fluoro adenosine
  modified_base 15: mod_base = OTHER; note = 2'O-methyl cytidine
  modified_base 16: mod_base = OTHER; note = 2'-fluoro adenosine
  modified_base 17: mod_base = OTHER; note = 2'O-methyl adenosine
  modified_base 18: mod_base = OTHER; note = 2'-fluoro guanosine
  modified_base 19: mod_base = OTHER; note = 2'O-methyl cytidine
  modified_base 20: mod_base = OTHER; note = 2'-fluoro uridine
  modified_base 21: mod_base = OTHER; note = 2'O-methyl cytidine phosphorothioate
  modified_base 22: mod_base = OTHER; note = 2'O-methyl uridine phosphorothioate
  modified_base 23: mod_base = OTHER; note = 2'O-methyl uridine
cagcccgcgaaggacaagctctt

SEQ ID NO: 1731 - RNA, 23 nt, synthetic construct
  source 1..23: mol_type = other RNA
  modified_base 1: mod_base = OTHER; note = 5' vinyl phosphonate 2'O-methyl guanosine phosphorothioate
  modified_base 2: mod_base = OTHER; note = 2'-fluoro cytidine phosphorothioate
  modified_base 3: mod_base = OTHER; note = 2'O-methyl adenosine
  modified_base 4: mod_base = OTHER; note = 2'-fluoro guanosine
  modified_base 5: mod_base = OTHER; note = 2'O-methyl cytidine
  modified_base 6: mod_base = OTHER; note = 2'-fluoro cytidine
  modified_base 7: mod_base = OTHER; note = 2'O-methyl cytidine
  modified_base 8: mod_base = OTHER; note = 2'-fluoro guanosine
  modified_base 9: mod_base = OTHER; note = 2'O-methyl cytidine
  modified_base 10: mod_base = OTHER; note = 2'-fluoro guanosine
  modified_base 11: mod_base = OTHER; note = 2'O-methyl adenosine
  modified_base 12: mod_base = OTHER; note = 2'-fluoro adenosine
  modified_base 13: mod_base = OTHER; note = 2'O-methyl guanosine
  modified_base 14: mod_base = OTHER; note = 2'-fluoro guanosine
  modified_base 15: mod_base = OTHER; note = 2'O-methyl adenosine
  modified_base 16: mod_base = OTHER; note = 2'-fluoro cytidine
  modified_base 17: mod_base = OTHER; note = 2'O-methyl adenosine
  modified_base 18: mod_base = OTHER; note = 2'-fluoro adenosine
  modified_base 19: mod_base = OTHER; note = 2'O-methyl guanosine
  modified_base 20: mod_base = OTHER; note = 2'-fluoro cytidine
  modified_base 21: mod_base = OTHER; note = 2'O-methyl uridine phosphorothioate
  modified_base 22: mod_base = OTHER; note = 2'O-methyl uridine phosphorothioate
  modified_base 23: mod_base = OTHER; note = 2'O-methyl uridine
gcagcccgcgaaggacaagcttt

SEQ ID NO: 1732 - RNA, 23 nt, synthetic construct
  source 1..23: mol_type = other RNA
  modified_base 1: mod_base = OTHER; note = 5' vinyl phosphonate 2'O-methyl guanosine phosphorothioate
  modified_base 2: mod_base = OTHER; note = 2'-fluoro cytidine phosphorothioate
  modified_base 3: mod_base = OTHER; note = 2'O-methyl cytidine
  modified_base 4: mod_base = OTHER; note = 2'-fluoro guanosine
  modified_base 5: mod_base = OTHER; note = 2'O-methyl cytidine
  modified_base 6: mod_base = OTHER; note = 2'-fluoro adenosine
  modified_base 7: mod_base = OTHER; note = 2'O-methyl guanosine
  modified_base 8: mod_base = OTHER; note = 2'-fluoro cytidine
  modified_base 9: mod_base = OTHER; note = 2'O-methyl cytidine
  modified_base 10: mod_base = OTHER; note = 2'-fluoro cytidine
  modified_base 11: mod_base = OTHER; note = 2'O-methyl guanosine
  modified_base 12: mod_base = OTHER; note = 2'-fluoro cytidine
  modified_base 13: mod_base = OTHER; note = 2'O-methyl guanosine
  modified_base 14: mod_base = OTHER; note = 2'-fluoro adenosine
  modified_base 15: mod_base = OTHER; note = 2'O-methyl adenosine
  modified_base 16: mod_base = OTHER; note = 2'-fluoro guanosine
  modified_base 17: mod_base = OTHER; note = 2'O-methyl guanosine
  modified_base 18: mod_base = OTHER; note = 2'-fluoro adenosine
  modified_base 19: mod_base = OTHER; note = 2'O-methyl cytidine
  modified_base 20: mod_base = OTHER; note = 2'-fluoro adenosine
  modified_base 21: mod_base = OTHER; note = 2'O-methyl adenosine phosphorothioate
  modified_base 22: mod_base = OTHER; note = 2'O-methyl uridine phosphorothioate
  modified_base 23: mod_base = OTHER; note = 2'O-methyl uridine
gccgcagcccgcgaaggacaatt

SEQ ID NO: 1733 - RNA, 23 nt, synthetic construct
  source 1..23: mol_type = other RNA
  modified_base 1: mod_base = OTHER; note = 5' vinyl phosphonate 2'O-methyl adenosine phosphorothioate
  modified_base 2: mod_base = OTHER; note = 2'-fluoro guanosine phosphorothioate
  modified_base 3: mod_base = OTHER; note = 2'O-methyl cytidine
  modified_base 4: mod_base = OTHER; note = 2'-fluoro cytidine
  modified_base 5: mod_base = OTHER; note = 2'O-methyl guanosine
  modified_base 6: mod_base = OTHER; note = 2'-fluoro cytidine
  modified_base 7: mod_base = OTHER; note = 2'O-methyl adenosine
  modified_base 8: mod_base = OTHER; note = 2'-fluoro guanosine
  modified_base 9: mod_base = OTHER; note = 2'O-methyl cytidine
  modified_base 10: mod_base = OTHER; note = 2'-fluoro cytidine
  modified_base 11: mod_base = OTHER; note = 2'O-methyl cytidine
  modified_base 12: mod_base = OTHER; note = 2'-fluoro guanosine
  modified_base 13: mod_base = OTHER; note = 2'O-methyl cytidine
  modified_base 14: mod_base = OTHER; note = 2'-fluoro guanosine
  modified_base 15: mod_base = OTHER; note = 2'O-methyl adenosine
  modified_base 16: mod_base = OTHER; note = 2'-fluoro adenosine
  modified_base 17: mod_base = OTHER; note = 2'O-methyl guanosine
  modified_base 18: mod_base = OTHER; note = 2'-fluoro guanosine
  modified_base 19: mod_base = OTHER; note = 2'O-methyl adenosine
  modified_base 20: mod_base = OTHER; note = 2'-fluoro cytidine
  modified_base 21: mod_base = OTHER; note = 2'O-methyl adenosine phosphorothioate
  modified_base 22: mod_base = OTHER; note = 2'O-methyl uridine phosphorothioate
  modified_base 23: mod_base = OTHER; note = 2'O-methyl uridine
agccgcagcccgcgaaggacatt

SEQ ID NO: 1734 - RNA, 23 nt, synthetic construct
  source 1..23: mol_type = other RNA
  modified_base 1: mod_base = OTHER; note = 5' vinyl phosphonate 2'O-methyl adenosine phosphorothioate
  modified_base 2: mod_base = OTHER; note = 2'-fluoro adenosine phosphorothioate
  modified_base 3: mod_base = OTHER; note = 2'O-methyl guanosine
  modified_base 4: mod_base = OTHER; note = 2'-fluoro cytidine
  modified_base 5: mod_base = OTHER; note = 2'O-methyl cytidine
  modified_base 6: mod_base = OTHER; note = 2'-fluoro guanosine
  modified_base 7: mod_base = OTHER; note = 2'O-methyl cytidine
  modified_base 8: mod_base = OTHER; note = 2'-fluoro adenosine
  modified_base 9: mod_base = OTHER; note = 2'O-methyl guanosine
  modified_base 10: mod_base = OTHER; note = 2'-fluoro cytidine
  modified_base 11: mod_base = OTHER; note = 2'O-methyl cytidine
  modified_base 12: mod_base = OTHER; note = 2'-fluoro cytidine
  modified_base 13: mod_base = OTHER; note = 2'O-methyl guanosine
  modified_base 14: mod_base = OTHER; note = 2'-fluoro cytidine
  modified_base 15: mod_base = OTHER; note = 2'O-methyl guanosine
  modified_base 16: mod_base = OTHER; note = 2'-fluoro adenosine
  modified_base 17: mod_base = OTHER; note = 2'O-methyl adenosine
  modified_base 18: mod_base = OTHER; note = 2'-fluoro guanosine
  modified_base 19: mod_base = OTHER; note = 2'O-methyl guanosine
  modified_base 20: mod_base = OTHER; note = 2'-fluoro adenosine
  modified_base 21: mod_base = OTHER; note = 2'O-methyl cytidine phosphorothioate
  modified_base 22: mod_base = OTHER; note = 2'O-methyl uridine phosphorothioate
  modified_base 23: mod_base = OTHER; note = 2'O-methyl uridine
aagccgcagcccgcgaaggactt

SEQ ID NO: 1735 - RNA, 23 nt, synthetic construct
  source 1..23: mol_type = other RNA
  modified_base 1: mod_base = OTHER; note = 5' vinyl phosphonate 2'O-methyl guanosine phosphorothioate
  modified_base 2: mod_base = OTHER; note = 2'-fluoro adenosine phosphorothioate
  modified_base 3: mod_base = OTHER; note = 2'O-methyl adenosine
  modified_base 4: mod_base = OTHER; note = 2'-fluoro guanosine
  modified_base 5: mod_base = OTHER; note = 2'O-methyl cytidine
  modified_base 6: mod_base = OTHER; note = 2'-fluoro cytidine
  modified_base 7: mod_base = OTHER; note = 2'O-methyl cytidine
  modified_base 8: mod_base = OTHER; note = 2'-fluoro adenosine
  modified_base 9: mod_base = OTHER; note = 2'O-methyl guanosine
  modified_base 10: mod_base = OTHER; note = 2'-fluoro guanosine
  modified_base 11: mod_base = OTHER; note = 2'O-methyl adenosine
  modified_base 12: mod_base = OTHER; note = 2'-fluoro adenosine
  modified_base 13: mod_base = OTHER; note = 2'O-methyl guanosine
  modified_base 14: mod_base = OTHER; note = 2'-fluoro cytidine
  modified_base 15: mod_base = OTHER; note = 2'O-methyl cytidine
  modified_base 16: mod_base = OTHER; note = 2'-fluoro guanosine
  modified_base 17: mod_base = OTHER; note = 2'O-methyl cytidine
  modified_base 18: mod_base = OTHER; note = 2'-fluoro adenosine
  modified_base 19: mod_base = OTHER; note = 2'O-methyl guanosine
  modified_base 20: mod_base = OTHER; note = 2'-fluoro cytidine
  modified_base 21: mod_base = OTHER; note = 2'O-methyl cytidine phosphorothioate
  modified_base 22: mod_base = OTHER; note = 2'O-methyl uridine phosphorothioate
  modified_base 23: mod_base = OTHER; note = 2'O-methyl uridine
gaagcccaggaagccgcagcctt

SEQ ID NO: 1736 - RNA, 23 nt, synthetic construct
  source 1..23: mol_type = other RNA
  modified_base 1: mod_base = OTHER; note = 5' vinyl phosphonate 2'O-methyl adenosine phosphorothioate
  modified_base 2: mod_base = OTHER; note = 2'-fluoro guanosine phosphorothioate
  modified_base 3: mod_base = OTHER; note = 2'O-methyl adenosine
  modified_base 4: mod_base = OTHER; note = 2'-fluoro adenosine
  modified_base 5: mod_base = OTHER; note = 2'O-methyl guanosine
  modified_base 6: mod_base = OTHER; note = 2'-fluoro cytidine
  modified_base 7: mod_base = OTHER; note = 2'O-methyl cytidine
  modified_base 8: mod_base = OTHER; note = 2'-fluoro cytidine
  modified_base 9: mod_base = OTHER; note = 2'O-methyl adenosine
  modified_base 10: mod_base = OTHER; note = 2'-fluoro guanosine
  modified_base 11: mod_base = OTHER; note = 2'O-methyl guanosine
  modified_base 12: mod_base = OTHER; note = 2'-fluoro adenosine
  modified_base 13: mod_base = OTHER; note = 2'O-methyl adenosine
  modified_base 14: mod_base = OTHER; note = 2'-fluoro guanosine
  modified_base 15: mod_base = OTHER; note = 2'O-methyl cytidine
  modified_base 16: mod_base = OTHER; note = 2'-fluoro cytidine
  modified_base 17: mod_base = OTHER; note = 2'O-methyl guanosine
  modified_base 18: mod_base = OTHER; note = 2'-fluoro cytidine
  modified_base 19: mod_base = OTHER; note = 2'O-methyl adenosine
  modified_base 20: mod_base = OTHER; note = 2'-fluoro guanosine
  modified_base 21: mod_base = OTHER; note = 2'O-methyl cytidine phosphorothioate
  modified_base 22: mod_base = OTHER; note = 2'O-methyl uridine phosphorothioate
  modified_base 23: mod_base = OTHER; note = 2'O-methyl uridine
agaagcccaggaagccgcagctt

SEQ ID NO: 1737 - RNA, 23 nt, synthetic construct
  source 1..23: mol_type = other RNA
  modified_base 1: mod_base = OTHER; note = 5' vinyl phosphonate 2'O-methyl uridine phosphorothioate
  modified_base 2: mod_base = OTHER; note = 2'-fluoro adenosine phosphorothioate
  modified_base 3: mod_base = OTHER; note = 2'O-methyl guanosine
  modified_base 4: mod_base = OTHER; note = 2'-fluoro adenosine
  modified_base 5: mod_base = OTHER; note = 2'O-methyl adenosine
  modified_base 6: mod_base = OTHER; note = 2'-fluoro guanosine
  modified_base 7: mod_base = OTHER; note = 2'O-methyl cytidine
  modified_base 8: mod_base = OTHER; note = 2'-fluoro cytidine
  modified_base 9: mod_base = OTHER; note = 2'O-methyl cytidine
  modified_base 10: mod_base = OTHER; note = 2'-fluoro adenosine
  modified_base 11: mod_base = OTHER; note = 2'O-methyl guanosine
  modified_base 12: mod_base = OTHER; note = 2'-fluoro guanosine
  modified_base 13: mod_base = OTHER; note = 2'O-methyl adenosine
  modified_base 14: mod_base = OTHER; note = 2'-fluoro adenosine
  modified_base 15: mod_base = OTHER; note = 2'O-methyl guanosine
  modified_base 16: mod_base = OTHER; note = 2'-fluoro cytidine
  modified_base 17: mod_base = OTHER; note = 2'O-methyl cytidine
  modified_base 18: mod_base = OTHER; note = 2'-fluoro guanosine
  modified_base 19: mod_base = OTHER; note = 2'O-methyl cytidine
  modified_base 20: mod_base = OTHER; note = 2'-fluoro adenosine
  modified_base 21: mod_base = OTHER; note = 2'O-methyl guanosine phosphorothioate
  modified_base 22: mod_base = OTHER; note = 2'O-methyl uridine phosphorothioate
  modified_base 23: mod_base = OTHER; note = 2'O-methyl uridine
tagaagcccaggaagccgcagtt

SEQ ID NO: 1738 - RNA, 23 nt, synthetic construct
  source 1..23: mol_type = other RNA
  modified_base 1: mod_base = OTHER; note = 5' vinyl phosphonate 2'O-methyl guanosine phosphorothioate
  modified_base 2: mod_base = OTHER; note = 2'-fluoro uridine phosphorothioate
  modified_base 3: mod_base = OTHER; note = 2'O-methyl adenosine
  modified_base 4: mod_base = OTHER; note = 2'-fluoro guanosine
  modified_base 5: mod_base = OTHER; note = 2'O-methyl adenosine
  modified_base 6: mod_base = OTHER; note = 2'-fluoro adenosine
  modified_base 7: mod_base = OTHER; note = 2'O-methyl guanosine
  modified_base 8: mod_base = OTHER; note = 2'-fluoro cytidine
  modified_base 9: mod_base = OTHER; note = 2'O-methyl cytidine
  modified_base 10: mod_base = OTHER; note = 2'-fluoro cytidine
  modified_base 11: mod_base = OTHER; note = 2'O-methyl adenosine
  modified_base 12: mod_base = OTHER; note = 2'-fluoro guanosine
  modified_base 13: mod_base = OTHER; note = 2'O-methyl guanosine
  modified_base 14: mod_base = OTHER; note = 2'-fluoro adenosine
  modified_base 15: mod_base = OTHER; note = 2'O-methyl adenosine
  modified_base 16: mod_base = OTHER; note = 2'-fluoro guanosine
  modified_base 17: mod_base = OTHER; note = 2'O-methyl cytidine
  modified_base 18: mod_base = OTHER; note = 2'-fluoro cytidine
  modified_base 19: mod_base = OTHER; note = 2'O-methyl guanosine
  modified_base 20: mod_base = OTHER; note = 2'-fluoro cytidine
  modified_base 21: mod_base = OTHER; note = 2'O-methyl adenosine phosphorothioate
  modified_base 22: mod_base = OTHER; note = 2'O-methyl uridine phosphorothioate
  modified_base 23: mod_base = OTHER; note = 2'O-methyl uridine
gtagaagcccaggaagccgcatt

SEQ ID NO: 1739 - RNA, 23 nt, synthetic construct
  source 1..23: mol_type = other RNA
  modified_base 1: mod_base = OTHER; note = 5' vinyl phosphonate 2'O-methyl guanosine phosphorothioate
  modified_base 2: mod_base = OTHER; note = 2'-fluoro guanosine phosphorothioate
  modified_base 3: mod_base = OTHER; note = 2'O-methyl uridine
  modified_base 4: mod_base = OTHER; note = 2'-fluoro adenosine
  modified_base 5: mod_base = OTHER; note = 2'O-methyl guanosine
  modified_base 6: mod_base = OTHER; note = 2'-fluoro adenosine
  modified_base 7: mod_base = OTHER; note = 2'O-methyl adenosine
  modified_base 8: mod_base = OTHER; note = 2'-fluoro guanosine
  modified_base 9: mod_base = OTHER; note = 2'O-methyl cytidine
  modified_base 10: mod_base = OTHER; note = 2'-fluoro cytidine
  modified_base 11: mod_base = OTHER; note = 2'O-methyl cytidine
  modified_base 12: mod_base = OTHER; note = 2'-fluoro adenosine
  modified_base 13: mod_base = OTHER; note = 2'O-methyl guanosine
  modified_base 14: mod_base = OTHER; note = 2'-fluoro guanosine
  modified_base 15: mod_base = OTHER; note = 2'O-methyl adenosine
  modified_base 16: mod_base = OTHER; note = 2'-fluoro adenosine
  modified_base 17: mod_base = OTHER; note = 2'O-methyl guanosine
  modified_base 18: mod_base = OTHER; note = 2'-fluoro cytidine
  modified_base 19: mod_base = OTHER; note = 2'O-methyl cytidine
  modified_base 20: mod_base = OTHER; note = 2'-fluoro guanosine
  modified_base 21: mod_base = OTHER; note = 2'O-methyl cytidine phosphorothioate
  modified_base 22: mod_base = OTHER; note = 2'O-methyl uridine phosphorothioate
  modified_base 23: mod_base = OTHER; note = 2'O-methyl uridine
ggtagaagcccaggaagccgctt

SEQ ID NO: 1740 - RNA, 23 nt, synthetic construct
  source 1..23: mol_type = other RNA
  modified_base 1: mod_base = OTHER; note = 5' vinyl phosphonate 2'O-methyl adenosine phosphorothioate
  modified_base 2: mod_base = OTHER; note = 2'-fluoro cytidine phosphorothioate
  modified_base 3: mod_base = OTHER; note = 2'O-methyl guanosine
  modified_base 4: mod_base = OTHER; note = 2'-fluoro uridine
  modified_base 5: mod_base = OTHER; note = 2'O-methyl guanosine
  modified_base 6: mod_base = OTHER; note = 2'-fluoro guanosine
  modified_base 7: mod_base = OTHER; note = 2'O-methyl uridine
  modified_base 8: mod_base = OTHER; note = 2'-fluoro adenosine
  modified_base 9: mod_base = OTHER; note = 2'O-methyl guanosine
  modified_base 10: mod_base = OTHER; note = 2'-fluoro adenosine
  modified_base 11: mod_base = OTHER; note = 2'O-methyl adenosine
  modified_base 12: mod_base = OTHER; note = 2'-fluoro guanosine
  modified_base 13: mod_base = OTHER; note = 2'O-methyl cytidine
  modified_base 14: mod_base = OTHER; note = 2'-fluoro cytidine
  modified_base 15: mod_base = OTHER; note = 2'O-methyl cytidine
  modified_base 16: mod_base = OTHER; note = 2'-fluoro adenosine
  modified_base 17: mod_base = OTHER; note = 2'O-methyl guanosine
  modified_base 18: mod_base = OTHER; note = 2'-fluoro guanosine
  modified_base 19: mod_base = OTHER; note = 2'O-methyl adenosine
  modified_base 20: mod_base = OTHER; note = 2'-fluoro adenosine
  modified_base 21: mod_base = OTHER; note = 2'O-methyl guanosine phosphorothioate
  modified_base 22: mod_base = OTHER; note = 2'O-methyl uridine phosphorothioate
  modified_base 23: mod_base = OTHER; note = 2'O-methyl uridine
acgtggtagaagcccaggaagtt

SEQ ID NO: 1741 - RNA, 23 nt, synthetic construct
  source 1..23: mol_type = other RNA
  modified_base 1: mod_base = OTHER; note = 5' vinyl phosphonate 2'O-methyl cytidine phosphorothioate
  modified_base 2: mod_base = OTHER; note = 2'-fluoro cytidine phosphorothioate
  modified_base 3: mod_base = OTHER; note = 2'O-methyl cytidine
  modified_base 4: mod_base = OTHER; note = 2'-fluoro guanosine
  modified_base 5: mod_base = OTHER; note = 2'O-methyl adenosine
  modified_base 6: mod_base = OTHER; note = 2'-fluoro cytidine
  modified_base 7: mod_base = OTHER; note = 2'O-methyl guanosine
  modified_base 8: mod_base = OTHER; note = 2'-fluoro uridine
  modified_base 9: mod_base = OTHER; note = 2'O-methyl guanosine
  modified_base 10: mod_base = OTHER; note = 2'-fluoro guanosine
  modified_base 11: mod_base = OTHER; note = 2'O-methyl uridine
  modified_base 12: mod_base = OTHER; note = 2'-fluoro adenosine
  modified_base 13: mod_base = OTHER; note = 2'O-methyl guanosine
  modified_base 14: mod_base = OTHER; note = 2'-fluoro adenosine
  modified_base 15: mod_base = OTHER; note = 2'O-methyl adenosine
  modified_base 16: mod_base = OTHER; note = 2'-fluoro guanosine
  modified_base 17: mod_base = OTHER; note = 2'O-methyl cytidine
  modified_base 18: mod_base = OTHER; note = 2'-fluoro cytidine
  modified_base 19: mod_base = OTHER; note = 2'O-methyl cytidine
  modified_base 20: mod_base = OTHER; note = 2'-fluoro adenosine
  modified_base 21: mod_base = OTHER; note = 2'O-methyl guanosine phosphorothioate
  modified_base 22: mod_base = OTHER; note = 2'O-methyl uridine phosphorothioate
  modified_base 23: mod_base = OTHER; note = 2'O-methyl uridine
cccgacgtggtagaagcccagtt

SEQ ID NO: 1742 - RNA, 23 nt, synthetic construct
  source 1..23: mol_type = other RNA
  modified_base 1: mod_base = OTHER; note = 5' vinyl phosphonate 2'O-methyl cytidine phosphorothioate
  modified_base 2: mod_base = OTHER; note = 2'-fluoro cytidine phosphorothioate
  modified_base 3: mod_base = OTHER; note = 2'O-methyl cytidine
  modified_base 4: mod_base = OTHER; note = 2'-fluoro cytidine
  modified_base 5: mod_base = OTHER; note = 2'O-methyl guanosine
  modified_base 6: mod_base = OTHER; note = 2'-fluoro adenosine
  modified_base 7: mod_base = OTHER; note = 2'O-methyl cytidine
  modified_base 8: mod_base = OTHER; note = 2'-fluoro guanosine
  modified_base 9: mod_base = OTHER; note = 2'O-methyl uridine
  modified_base 10: mod_base = OTHER; note = 2'-fluoro guanosine
  modified_base 11: mod_base = OTHER; note = 2'O-methyl guanosine
  modified_base 12: mod_base = OTHER; note = 2'-fluoro uridine
  modified_base 13: mod_base = OTHER; note = 2'O-methyl adenosine
  modified_base 14: mod_base = OTHER; note = 2'-fluoro guanosine
  modified_base 15: mod_base = OTHER; note = 2'O-methyl adenosine
  modified_base 16: mod_base = OTHER; note = 2'-fluoro adenosine
  modified_base 17: mod_base = OTHER; note = 2'O-methyl guanosine
  modified_base 18: mod_base = OTHER; note = 2'-fluoro cytidine
  modified_base 19: mod_base = OTHER; note = 2'O-methyl cytidine
  modified_base 20: mod_base = OTHER; note = 2'-fluoro cytidine
  modified_base 21: mod_base = OTHER; note = 2'O-methyl adenosine phosphorothioate
  modified_base 22: mod_base = OTHER; note = 2'O-methyl uridine phosphorothioate
  modified_base 23: mod_base = OTHER; note = 2'O-methyl uridine
ccccgacgtggtagaagcccatt

SEQ ID NO: 1743 - RNA, 23 nt, synthetic construct
  source 1..23: mol_type = other RNA
  modified_base 1: mod_base = OTHER; note = 5' vinyl phosphonate 2'O-methyl cytidine phosphorothioate
  modified_base 2: mod_base = OTHER; note = 2'-fluoro guanosine phosphorothioate
  modified_base 3: mod_base = OTHER; note = 2'O-methyl cytidine
  modified_base 4: mod_base = OTHER; note = 2'-fluoro cytidine
  modified_base 5: mod_base = OTHER; note = 2'O-methyl cytidine
  modified_base 6: mod_base = OTHER; note = 2'-fluoro cytidine
  modified_base 7: mod_base = OTHER; note = 2'O-methyl guanosine
  modified_base 8: mod_base = OTHER; note = 2'-fluoro adenosine
  modified_base 9: mod_base = OTHER; note = 2'O-methyl cytidine
  modified_base 10: mod_base = OTHER; note = 2'-fluoro guanosine
  modified_base 11: mod_base = OTHER; note = 2'O-methyl uridine
  modified_base 12: mod_base = OTHER; note = 2'-fluoro guanosine
  modified_base 13: mod_base = OTHER; note = 2'O-methyl guanosine
  modified_base 14: mod_base = OTHER; note = 2'-fluoro uridine
  modified_base 15: mod_base = OTHER; note = 2'O-methyl adenosine
  modified_base 16: mod_base = OTHER; note = 2'-fluoro guanosine
  modified_base 17: mod_base = OTHER; note = 2'O-methyl adenosine
  modified_base 18: mod_base = OTHER; note = 2'-fluoro adenosine
  modified_base 19: mod_base = OTHER; note = 2'O-methyl guanosine
  modified_base 20: mod_base = OTHER; note = 2'-fluoro cytidine
  modified_base 21: mod_base = OTHER; note = 2'O-methyl cytidine phosphorothioate
  modified_base 22: mod_base = OTHER; note = 2'O-methyl uridine phosphorothioate
  modified_base 23: mod_base = OTHER; note = 2'O-methyl uridine
cgccccgacgtggtagaagcctt

SEQ ID NO: 1744 - RNA, 23 nt, synthetic construct
  source 1..23: mol_type = other RNA
  modified_base 1: mod_base = OTHER; note = 5' vinyl phosphonate 2'O-methyl uridine phosphorothioate
  modified_base 2: mod_base = OTHER; note = 2'-fluoro cytidine phosphorothioate
  modified_base 3: mod_base = OTHER; note = 2'O-methyl guanosine
  modified_base 4: mod_base = OTHER; note = 2'-fluoro cytidine
  modified_base 5: mod_base = OTHER; note = 2'O-methyl cytidine
  modified_base 6: mod_base = OTHER; note = 2'-fluoro cytidine
  modified_base 7: mod_base = OTHER; note = 2'O-methyl cytidine
  modified_base 8: mod_base = OTHER; note = 2'-fluoro guanosine
  modified_base 9: mod_base = OTHER; note = 2'O-methyl adenosine
  modified_base 10: mod_base = OTHER; note = 2'-fluoro cytidine
  modified_base 11: mod_base = OTHER; note = 2'O-methyl guanosine
  modified_base 12: mod_base = OTHER; note = 2'-fluoro uridine
  modified_base 13: mod_base = OTHER; note = 2'O-methyl guanosine
  modified_base 14: mod_base = OTHER; note = 2'-fluoro guanosine
  modified_base 15: mod_base = OTHER; note = 2'O-methyl uridine
  modified_base 16: mod_base = OTHER; note = 2'-fluoro adenosine
  modified_base 17: mod_base = OTHER; note = 2'O-methyl guanosine
  modified_base 18: mod_base = OTHER; note = 2'-fluoro adenosine
  modified_base 19: mod_base = OTHER; note = 2'O-methyl adenosine
  modified_base 20: mod_base = OTHER; note = 2'-fluoro guanosine
  modified_base 21: mod_base = OTHER; note = 2'O-methyl cytidine phosphorothioate
  modified_base 22: mod_base = OTHER; note = 2'O-methyl uridine phosphorothioate
  modified_base 23: mod_base = OTHER; note = 2'O-methyl uridine
tcgccccgacgtggtagaagctt

SEQ ID NO: 1745 - RNA, 23 nt, synthetic construct
  source 1..23: mol_type = other RNA
  modified_base 1: mod_base = OTHER; note = 5' vinyl phosphonate 2'O-methyl guanosine phosphorothioate
  modified_base 2: mod_base = OTHER; note = 2'-fluoro uridine phosphorothioate
  modified_base 3: mod_base = OTHER; note = 2'O-methyl cytidine
  modified_base 4: mod_base = OTHER; note = 2'-fluoro guanosine
  modified_base 5: mod_base = OTHER; note = 2'O-methyl cytidine
  modified_base 6: mod_base = OTHER; note = 2'-fluoro cytidine
  modified_base 7: mod_base = OTHER; note = 2'O-methyl cytidine
  modified_base 8: mod_base = OTHER; note = 2'-fluoro cytidine
  modified_base 9: mod_base = OTHER; note = 2'O-methyl guanosine
  modified_base 10: mod_base = OTHER; note = 2'-fluoro adenosine
  modified_base 11: mod_base = OTHER; note = 2'O-methyl cytidine
  modified_base 12: mod_base = OTHER; note = 2'-fluoro guanosine
  modified_base 13: mod_base = OTHER; note = 2'O-methyl uridine
  modified_base 14: mod_base = OTHER; note = 2'-fluoro guanosine
  modified_base 15: mod_base = OTHER; note = 2'O-methyl guanosine
  modified_base 16: mod_base = OTHER; note = 2'-fluoro uridine
  modified_base 17: mod_base = OTHER; note = 2'O-methyl adenosine
  modified_base 18: mod_base = OTHER; note = 2'-fluoro guanosine
  modified_base 19: mod_base = OTHER; note = 2'O-methyl adenosine
  modified_base 20: mod_base = OTHER; note = 2'-fluoro adenosine
  modified_base 21: mod_base = OTHER; note = 2'O-methyl guanosine phosphorothioate
  modified_base 22: mod_base = OTHER; note = 2'O-methyl uridine phosphorothioate
  modified_base 23: mod_base = OTHER; note = 2'O-methyl uridine
gtcgccccgacgtggtagaagtt

SEQ ID NO: 1746 - RNA, 23 nt, synthetic construct
  source 1..23: mol_type = other RNA
  modified_base 1: mod_base = OTHER; note = 5' vinyl phosphonate 2'O-methyl guanosine phosphorothioate
  modified_base 2: mod_base = OTHER; note = 2'-fluoro guanosine phosphorothioate
  modified_base 3: mod_base = OTHER; note = 2'O-methyl uridine
  modified_base 4: mod_base = OTHER; note = 2'-fluoro cytidine
  modified_base 5: mod_base = OTHER; note = 2'O-methyl guanosine
  modified_base 6: mod_base = OTHER; note = 2'-fluoro cytidine
  modified_base 7: mod_base = OTHER; note = 2'O-methyl cytidine
  modified_base 8: mod_base = OTHER; note = 2'-fluoro cytidine
  modified_base 9: mod_base = OTHER; note = 2'O-methyl cytidine
  modified_base 10: mod_base = OTHER; note = 2'-fluoro guanosine
  modified_base 11: mod_base = OTHER; note = 2'O-methyl adenosine
  modified_base 12: mod_base = OTHER; note = 2'-fluoro cytidine
  modified_base 13: mod_base = OTHER; note = 2'O-methyl guanosine
  modified_base 14: mod_base = OTHER; note = 2'-fluoro uridine
  modified_base 15: mod_base = OTHER; note = 2'O-methyl guanosine
  modified_base 16: mod_base = OTHER; note = 2'-fluoro guanosine
  modified_base 17: mod_base = OTHER; note = 2'O-methyl uridine
  modified_base 18: mod_base = OTHER; note = 2'-fluoro adenosine
  modified_base 19: mod_base = OTHER; note = 2'O-methyl guanosine
  modified_base 20: mod_base = OTHER; note = 2'-fluoro adenosine
  modified_base 21: mod_base = OTHER; note = 2'O-methyl adenosine phosphorothioate
  modified_base 22: mod_base = OTHER; note = 2'O-methyl uridine phosphorothioate
  modified_base 23: mod_base = OTHER; note = 2'O-methyl uridine
ggtcgccccgacgtggtagaatt

SEQ ID NO: 1747 - RNA, 23 nt, synthetic construct
  source 1..23: mol_type = other RNA
  modified_base 1: mod_base = OTHER; note = 5' vinyl phosphonate 2'O-methyl cytidine phosphorothioate
  modified_base 2: mod_base = OTHER; note = 2'-fluoro guanosine phosphorothioate
  modified_base 3: mod_base = OTHER; note = 2'O-methyl guanosine
  modified_base 4: mod_base = OTHER; note = 2'-fluoro guanosine
  modified_base 5: mod_base = OTHER; note = 2'O-methyl uridine
  modified_base 6: mod_base = OTHER; note = 2'-fluoro cytidine
  modified_base 7: mod_base = OTHER; note = 2'O-methyl guanosine
  modified_base 8: mod_base = OTHER; note = 2'-fluoro cytidine
  modified_base 9: mod_base = OTHER; note = 2'O-methyl cytidine
  modified_base 10: mod_base = OTHER; note = 2'-fluoro cytidine
  modified_base 11: mod_base = OTHER; note = 2'O-methyl cytidine
  modified_base 12: mod_base = OTHER; note = 2'-fluoro guanosine
  modified_base 13: mod_base = OTHER; note = 2'O-methyl adenosine
  modified_base 14: mod_base = OTHER; note = 2'-fluoro cytidine
  modified_base 15: mod_base = OTHER; note = 2'O-methyl guanosine
  modified_base 16: mod_base = OTHER; note = 2'-fluoro uridine
  modified_base 17: mod_base = OTHER; note = 2'O-methyl guanosine
  modified_base 18: mod_base = OTHER; note = 2'-fluoro guanosine
  modified_base 19: mod_base = OTHER; note = 2'O-methyl uridine
  modified_base 20: mod_base = OTHER; note = 2'-fluoro adenosine
  modified_base 21: mod_base = OTHER; note = 2'O-methyl guanosine phosphorothioate
  modified_base 22: mod_base = OTHER; note = 2'O-methyl uridine phosphorothioate
  modified_base 23: mod_base = OTHER; note = 2'O-methyl uridine
cgggtcgccccgacgtggtagtt

SEQ ID NO: 1748 - RNA, 23 nt, synthetic construct
  source 1..23: mol_type = other RNA
  modified_base 1: mod_base = OTHER; note = 5' vinyl phosphonate 2'O-methyl cytidine phosphorothioate
  modified_base 2: mod_base = OTHER; note = 2'-fluoro guanosine phosphorothioate
  modified_base 3: mod_base = OTHER; note = 2'O-methyl guanosine
  modified_base 4: mod_base = OTHER; note = 2'-fluoro guanosine
  modified_base 5: mod_base = OTHER; note = 2'O-methyl guanosine
  modified_base 6: mod_base = OTHER; note = 2'-fluoro cytidine
  modified_base 7: mod_base = OTHER; note = 2'O-methyl guanosine
  modified_base 8: mod_base = OTHER; note = 2'-fluoro uridine
  modified_base 9: mod_base = OTHER; note = 2'O-methyl guanosine
  modified_base 10: mod_base = OTHER; note = 2'-fluoro cytidine
  modified_base 11: mod_base = OTHER; note = 2'O-methyl uridine
  modified_base 12: mod_base = OTHER; note = 2'-fluoro cytidine
  modified_base 13: mod_base = OTHER; note = 2'O-methyl guanosine
  modified_base 14: mod_base = OTHER; note = 2'-fluoro cytidine
  modified_base 15: mod_base = OTHER; note = 2'O-methyl uridine
  modified_base 16: mod_base = OTHER; note = 2'-fluoro cytidine
  modified_base 17: mod_base = OTHER; note = 2'O-methyl adenosine
  modified_base 18: mod_base = OTHER; note = 2'-fluoro guanosine
  modified_base 19: mod_base = OTHER; note = 2'O-methyl guanosine
  modified_base 20: mod_base = OTHER; note = 2'-fluoro cytidine
  modified_base 21: mod_base = OTHER; note = 2'O-methyl adenosine phosphorothioate
  modified_base 22: mod_base = OTHER; note = 2'O-methyl uridine phosphorothioate
  modified_base 23: mod_base = OTHER; note = 2'O-methyl uridine
cggggcgtgctcgctcaggcatt

SEQ ID NO: 1749 - RNA, 23 nt, synthetic construct
  source 1..23: mol_type = other RNA
  modified_base 1: mod_base = OTHER; note = 5' vinyl phosphonate 2'O-methyl guanosine phosphorothioate
  modified_base 2: mod_base = OTHER; note = 2'-fluoro cytidine phosphorothioate
  modified_base 3: mod_base = OTHER; note = 2'O-methyl guanosine
  modified_base 4: mod_base = OTHER; note = 2'-fluoro guanosine
  modified_base 5: mod_base = OTHER; note = 2'O-methyl guanosine
  modified_base 6: mod_base = OTHER; note = 2'-fluoro guanosine
  modified_base 7: mod_base = OTHER; note = 2'O-methyl cytidine
  modified_base 8: mod_base = OTHER; note = 2'-fluoro guanosine
  modified_base 9: mod_base = OTHER; note = 2'O-methyl uridine
  modified_base 10: mod_base = OTHER; note = 2'-fluoro guanosine
  modified_base 11: mod_base = OTHER; note = 2'O-methyl cytidine
  modified_base 12: mod_base = OTHER; note = 2'-fluoro uridine
  modified_base 13: mod_base = OTHER; note = 2'O-methyl cytidine
  modified_base 14: mod_base = OTHER; note = 2'-fluoro guanosine
  modified_base 15: mod_base = OTHER; note = 2'O-methyl cytidine
  modified_base 16: mod_base = OTHER; note = 2'-fluoro uridine
  modified_base 17: mod_base = OTHER; note = 2'O-methyl cytidine
  modified_base 18: mod_base = OTHER; note = 2'-fluoro adenosine
  modified_base 19: mod_base = OTHER; note = 2'O-methyl guanosine
  modified_base 20: mod_base = OTHER; note = 2'-fluoro guanosine
  modified_base 21: mod_base = OTHER; note = 2'O-methyl cytidine phosphorothioate
  modified_base 22: mod_base = OTHER; note = 2'O-methyl uridine phosphorothioate
  modified_base 23: mod_base = OTHER; note = 2'O-methyl uridine
gcggggcgtgctcgctcaggctt

SEQ ID NO: 1750 - RNA, 23 nt, synthetic construct
  source 1..23: mol_type = other RNA
  modified_base 1: mod_base = OTHER; note = 5' vinyl phosphonate 2'O-methyl guanosine phosphorothioate
  modified_base 2: mod_base = OTHER; note = 2'-fluoro guanosine phosphorothioate
  modified_base 3: mod_base = OTHER; note = 2'O-methyl uridine
  modified_base 4: mod_base = OTHER; note = 2'-fluoro guanosine
  modified_base 5: mod_base = OTHER; note = 2'O-methyl cytidine
  modified_base 6: mod_base = OTHER; note = 2'-fluoro guanosine
  modified_base 7: mod_base = OTHER; note = 2'O-methyl guanosine
  modified_base 8: mod_base = OTHER; note = 2'-fluoro guanosine
  modified_base 9: mod_base = OTHER; note = 2'O-methyl guanosine
  modified_base 10: mod_base = OTHER; note = 2'-fluoro cytidine
  modified_base 11: mod_base = OTHER; note = 2'O-methyl guanosine
  modified_base 12: mod_base = OTHER; note = 2'-fluoro uridine
  modified_base 13: mod_base = OTHER; note = 2'O-methyl guanosine
  modified_base 14: mod_base = OTHER; note = 2'-fluoro cytidine
  modified_base 15: mod_base = OTHER; note = 2'O-methyl uridine
  modified_base 16: mod_base = OTHER; note = 2'-fluoro cytidine
  modified_base 17: mod_base = OTHER; note = 2'O-methyl guanosine
  modified_base 18: mod_base = OTHER; note = 2'-fluoro cytidine
  modified_base 19: mod_base = OTHER; note = 2'O-methyl uridine
  modified_base 20: mod_base = OTHER; note = 2'-fluoro cytidine
  modified_base 21: mod_base = OTHER; note = 2'O-methyl adenosine phosphorothioate
  modified_base 22: mod_base = OTHER; note = 2'O-methyl uridine phosphorothioate
  modified_base 23: mod_base = OTHER; note = 2'O-methyl uridine
ggtgcggggcgtgctcgctcatt

SEQ ID NO: 1751 - RNA, 23 nt, synthetic construct
  source 1..23: mol_type = other RNA
  modified_base 1: mod_base = OTHER; note = 5' vinyl phosphonate 2'O-methyl guanosine phosphorothioate
  modified_base 2: mod_base = OTHER; note = 2'-fluoro adenosine phosphorothioate
  modified_base 3: mod_base = OTHER; note = 2'O-methyl guanosine
  modified_base 4: mod_base = OTHER; note = 2'-fluoro guanosine
  modified_base 5: mod_base = OTHER; note = 2'O-methyl uridine
  modified_base 6: mod_base = OTHER; note = 2'-fluoro guanosine
  modified_base 7: mod_base = OTHER; note = 2'O-methyl cytidine
  modified_base 8: mod_base = OTHER; note = 2'-fluoro guanosine
  modified_base 9: mod_base = OTHER; note = 2'O-methyl guanosine
  modified_base 10: mod_base = OTHER; note = 2'-fluoro guanosine
  modified_base 11: mod_base = OTHER; note = 2'O-methyl guanosine
  modified_base 12: mod_base = OTHER; note = 2'-fluoro cytidine
  modified_base 13: mod_base = OTHER; note = 2'O-methyl guanosine
  modified_base 14: mod_base = OTHER; note = 2'-fluoro uridine
  modified_base 15: mod_base = OTHER; note = 2'O-methyl guanosine
  modified_base 16: mod_base = OTHER; note = 2'-fluoro cytidine
  modified_base 17: mod_base = OTHER; note = 2'O-methyl uridine
  modified_base 18: mod_base = OTHER; note = 2'-fluoro cytidine
  modified_base 19: mod_base = OTHER; note = 2'O-methyl guanosine
  modified_base 20: mod_base = OTHER; note = 2'-fluoro cytidine
  modified_base 21: mod_base = OTHER; note = 2'O-methyl uridine phosphorothioate
  modified_base 22: mod_base = OTHER; note = 2'O-methyl uridine phosphorothioate
  modified_base 23: mod_base = OTHER; note = 2'O-methyl uridine
gaggtgcggggcgtgctcgcttt

SEQ ID NO: 1752 - RNA, 23 nt, synthetic construct
  source 1..23: mol_type = other RNA
  modified_base 1: mod_base = OTHER; note = 5' vinyl phosphonate 2'O-methyl guanosine phosphorothioate
  modified_base 2: mod_base = OTHER; note = 2'-fluoro guanosine phosphorothioate
  modified_base 3: mod_base = OTHER; note = 2'O-methyl adenosine
  modified_base 4: mod_base = OTHER; note = 2'-fluoro guanosine
  modified_base 5: mod_base = OTHER; note = 2'O-methyl guanosine
  modified_base 6: mod_base = OTHER; note = 2'-fluoro uridine
  modified_base 7: mod_base = OTHER; note = 2'O-methyl guanosine
  modified_base 8: mod_base = OTHER; note = 2'-fluoro cytidine
  modified_base 9: mod_base = OTHER; note = 2'O-methyl guanosine
  modified_base 10: mod_base = OTHER; note = 2'-fluoro guanosine
  modified_base 11: mod_base = OTHER; note = 2'O-methyl guanosine
  modified_base 12: mod_base = OTHER; note = 2'-fluoro guanosine
  modified_base 13: mod_base = OTHER; note = 2'O-methyl cytidine
  modified_base 14: mod_base = OTHER; note = 2'-fluoro guanosine
  modified_base 15: mod_base = OTHER; note = 2'O-methyl uridine
  modified_base 16: mod_base = OTHER; note = 2'-fluoro guanosine
  modified_base 17: mod_base = OTHER; note = 2'O-methyl cytidine
  modified_base 18: mod_base = OTHER; note = 2'-fluoro uridine
  modified_base 19: mod_base = OTHER; note = 2'O-methyl cytidine
  modified_base 20: mod_base = OTHER; note = 2'-fluoro guanosine
  modified_base 21: mod_base = OTHER; note = 2'O-methyl cytidine phosphorothioate
  modified_base 22: mod_base = OTHER; note = 2'O-methyl uridine phosphorothioate
  modified_base 23: mod_base = OTHER; note = 2'O-methyl uridine
ggaggtgcggggcgtgctcgctt

SEQ ID NO: 1753 - RNA, 23 nt, synthetic construct
  source 1..23: mol_type = other RNA
  modified_base 1: mod_base = OTHER; note = 5' vinyl phosphonate 2'O-methyl guanosine phosphorothioate
  modified_base 2: mod_base = OTHER; note = 2'-fluoro adenosine phosphorothioate
  modified_base 3: mod_base = OTHER; note = 2'O-methyl guanosine
  modified_base 4: mod_base = OTHER; note = 2'-fluoro guanosine
  modified_base 5: mod_base = OTHER; note = 2'O-methyl adenosine
  modified_base 6: mod_base = OTHER; note = 2'-fluoro guanosine
  modified_base 7: mod_base = OTHER; note = 2'O-methyl guanosine
  modified_base 8: mod_base = OTHER; note = 2'-fluoro uridine
  modified_base 9: mod_base = OTHER; note = 2'O-methyl guanosine
  modified_base 10: mod_base = OTHER; note = 2'-fluoro cytidine
  modified_base 11: mod_base = OTHER; note = 2'O-methyl guanosine
  modified_base 12: mod_base = OTHER; note = 2'-fluoro guanosine
  modified_base 13: mod_base = OTHER; note = 2'O-methyl guanosine
  modified_base 14: mod_base = OTHER; note = 2'-fluoro guanosine
  modified_base 15: mod_base = OTHER; note = 2'O-methyl cytidine
  modified_base 16: mod_base = OTHER; note = 2'-fluoro guanosine
  modified_base 17: mod_base = OTHER; note = 2'O-methyl uridine
  modified_base 18: mod_base = OTHER; note = 2'-fluoro guanosine
  modified_base 19: mod_base = OTHER; note = 2'O-methyl cytidine
  modified_base 20: mod_base = OTHER; note = 2'-fluoro uridine
  modified_base 21: mod_base = OTHER; note = 2'O-methyl cytidine phosphorothioate
  modified_base 22: mod_base = OTHER; note = 2'O-methyl uridine phosphorothioate
  modified_base 23: mod_base = OTHER; note = 2'O-methyl uridine
gaggaggtgcggggcgtgctctt

SEQ ID NO: 1754 - RNA, 23 nt, synthetic construct
  source 1..23: mol_type = other RNA
  modified_base 1: mod_base = OTHER; note = 5' vinyl phosphonate 2'O-methyl uridine phosphorothioate
  modified_base 2: mod_base = OTHER; note = 2'-fluoro cytidine phosphorothioate
  modified_base 3: mod_base = OTHER; note = 2'O-methyl guanosine
  modified_base 4: mod_base = OTHER; note = 2'-fluoro cytidine
  modified_base 5: mod_base = OTHER; note = 2'O-methyl guanosine
  modified_base 6: mod_base = OTHER; note = 2'-fluoro guanosine
  modified_base 7: mod_base = OTHER; note = 2'O-methyl adenosine
  modified_base 8: mod_base = OTHER; note = 2'-fluoro guanosine
  modified_base 9: mod_base = OTHER; note = 2'O-methyl guanosine
  modified_base 10: mod_base = OTHER; note = 2'-fluoro adenosine
  modified_base 11: mod_base = OTHER; note = 2'O-methyl guanosine
  modified_base 12: mod_base = OTHER; note = 2'-fluoro guanosine
  modified_base 13: mod_base = OTHER; note = 2'O-methyl uridine
  modified_base 14: mod_base = OTHER; note = 2'-fluoro guanosine
  modified_base 15: mod_base = OTHER; note = 2'O-methyl cytidine
  modified_base 16: mod_base = OTHER; note = 2'-fluoro guanosine
  modified_base 17: mod_base = OTHER; note = 2'O-methyl guanosine
  modified_base 18: mod_base = OTHER; note = 2'-fluoro guanosine
  modified_base 19: mod_base = OTHER; note = 2'O-methyl guanosine
  modified_base 20: mod_base = OTHER; note = 2'-fluoro cytidine
  modified_base 21: mod_base = OTHER; note = 2'O-methyl guanosine phosphorothioate
  modified_base 22: mod_base = OTHER; note = 2'O-methyl uridine phosphorothioate
  modified_base 23: mod_base = OTHER; note = 2'O-methyl uridine
tcgcggaggaggtgcggggcgtt

SEQ ID NO: 1755 - RNA, 23 nt, synthetic construct
  source 1..23: mol_type = other RNA
  modified_base 1: mod_base = OTHER; note = 5' vinyl phosphonate 2'O-methyl guanosine phosphorothioate
  modified_base 2: mod_base = OTHER; note = 2'-fluoro uridine phosphorothioate
  modified_base 3: mod_base = OTHER; note = 2'O-methyl cytidine
  modified_base 4: mod_base = OTHER; note = 2'-fluoro guanosine
  modified_base 5: mod_base = OTHER; note = 2'O-methyl cytidine
  modified_base 6: mod_base = OTHER; note = 2'-fluoro guanosine
  modified_base 7: mod_base = OTHER; note = 2'O-methyl guanosine
  modified_base 8: mod_base = OTHER; note = 2'-fluoro adenosine
  modified_base 9: mod_base = OTHER; note = 2'O-methyl guanosine
  modified_base 10: mod_base = OTHER; note = 2'-fluoro guanosine
  modified_base 11: mod_base = OTHER; note = 2'O-methyl adenosine
  modified_base 12: mod_base = OTHER; note = 2'-fluoro guanosine
  modified_base 13: mod_base = OTHER; note = 2'O-methyl guanosine
  modified_base 14: mod_base = OTHER; note = 2'-fluoro uridine
  modified_base 15: mod_base = OTHER; note = 2'O-methyl guanosine
  modified_base 16: mod_base = OTHER; note = 2'-fluoro cytidine
  modified_base 17: mod_base = OTHER; note = 2'O-methyl guanosine
  modified_base 18: mod_base = OTHER; note = 2'-fluoro guanosine
  modified_base 19: mod_base = OTHER; note = 2'O-methyl guanosine
  modified_base 20: mod_base = OTHER; note = 2'-fluoro guanosine
  modified_base 21: mod_base = OTHER; note = 2'O-methyl cytidine phosphorothioate
  modified_base 22: mod_base = OTHER; note = 2'O-methyl uridine phosphorothioate
  modified_base 23: mod_base = OTHER; note = 2'O-methyl uridine
gtcgcggaggaggtgcggggctt

SEQ ID NO: 1756 - RNA, 23 nt, synthetic construct
  source 1..23: mol_type = other RNA
  modified_base 1: mod_base = OTHER; note = 5' vinyl phosphonate 2'O-methyl cytidine phosphorothioate
  modified_base 2: mod_base = OTHER; note = 2'-fluoro guanosine phosphorothioate
  modified_base 3: mod_base = OTHER; note = 2'O-methyl uridine
  modified_base 4: mod_base = OTHER; note = 2'-fluoro cytidine
  modified_base 5: mod_base = OTHER; note = 2'O-methyl guanosine
  modified_base 6: mod_base = OTHER; note = 2'-fluoro cytidine
  modified_base 7: mod_base = OTHER; note = 2'O-methyl guanosine
  modified_base 8: mod_base = OTHER; note = 2'-fluoro guanosine
  modified_base 9: mod_base = OTHER; note = 2'O-methyl adenosine
  modified_base 10: mod_base = OTHER; note = 2'-fluoro guanosine
  modified_base 11: mod_base = OTHER; note = 2'O-methyl guanosine
  modified_base 12: mod_base = OTHER; note = 2'-fluoro adenosine
  modified_base 13: mod_base = OTHER; note = 2'O-methyl guanosine
  modified_base 14: mod_base = OTHER; note = 2'-fluoro guanosine
  modified_base 15: mod_base = OTHER; note = 2'O-methyl uridine
  modified_base 16: mod_base = OTHER; note = 2'-fluoro guanosine
  modified_base 17: mod_base = OTHER; note = 2'O-methyl cytidine
  modified_base 18: mod_base = OTHER; note = 2'-fluoro guanosine
  modified_base 19: mod_base = OTHER; note = 2'O-methyl guanosine
  modified_base 20: mod_base = OTHER; note = 2'-fluoro guanosine
  modified_base 21: mod_base = OTHER; note = 2'O-methyl guanosine phosphorothioate
  modified_base 22: mod_base = OTHER; note = 2'O-methyl uridine phosphorothioate
  modified_base 23: mod_base = OTHER; note = 2'O-methyl uridine
cgtcgcggaggaggtgcggggtt

SEQ ID NO: 1757 - RNA, 23 nt, synthetic construct
  source 1..23: mol_type = other RNA
  modified_base 1: mod_base = OTHER; note = 5' vinyl phosphonate 2'O-methyl guanosine phosphorothioate
  modified_base 2: mod_base = OTHER; note = 2'-fluoro cytidine phosphorothioate
  modified_base 3: mod_base = OTHER; note = 2'O-methyl guanosine
  modified_base 4: mod_base = OTHER; note = 2'-fluoro uridine
  modified_base 5: mod_base = OTHER; note = 2'O-methyl cytidine
  modified_base 6: mod_base = OTHER; note = 2'-fluoro guanosine
  modified_base 7: mod_base = OTHER; note = 2'O-methyl cytidine
  modified_base 8: mod_base = OTHER; note = 2'-fluoro guanosine
  modified_base 9: mod_base = OTHER; note = 2'O-methyl guanosine
  modified_base 10: mod_base = OTHER; note = 2'-fluoro adenosine
  modified_base 11: mod_base = OTHER; note = 2'O-methyl guanosine
  modified_base 12: mod_base = OTHER; note = 2'-fluoro guanosine
  modified_base 13: mod_base = OTHER; note = 2'O-methyl adenosine
  modified_base 14: mod_base = OTHER; note = 2'-fluoro guanosine
  modified_base 15: mod_base = OTHER; note = 2'O-methyl guanosine
  modified_base 16: mod_base = OTHER; note = 2'-fluoro uridine
  modified_base 17: mod_base = OTHER; note = 2'O-methyl guanosine
  modified_base 18: mod_base = OTHER; note = 2'-fluoro cytidine
  modified_base 19: mod_base = OTHER; note = 2'O-methyl guanosine
  modified_base 20: mod_base = OTHER; note = 2'-fluoro guanosine
  modified_base 21: mod_base = OTHER; note = 2'O-methyl guanosine phosphorothioate
  modified_base 22: mod_base = OTHER; note = 2'O-methyl uridine phosphorothioate
  modified_base 23: mod_base = OTHER; note = 2'O-methyl uridine
gcgtcgcggaggaggtgcgggtt

SEQ ID NO: 1758 - RNA, 23 nt, synthetic construct
  source 1..23: mol_type = other RNA
  modified_base 1: mod_base = OTHER; note = 5' vinyl phosphonate 2'O-methyl cytidine phosphorothioate
  modified_base 2: mod_base = OTHER; note = 2'-fluoro guanosine phosphorothioate
  modified_base 3: mod_base = OTHER; note = 2'O-methyl cytidine
  modified_base 4: mod_base = OTHER; note = 2'-fluoro guanosine
  modified_base 5: mod_base = OTHER; note = 2'O-methyl uridine
  modified_base 6: mod_base = OTHER; note = 2'-fluoro cytidine
  modified_base 7: mod_base = OTHER; note = 2'O-methyl guanosine
  modified_base 8: mod_base = OTHER; note = 2'-fluoro cytidine
  modified_base 9: mod_base = OTHER; note = 2'O-methyl guanosine
  modified_base 10: mod_base = OTHER; note = 2'-fluoro guanosine
  modified_base 11: mod_base = OTHER; note = 2'O-methyl adenosine
  modified_base 12: mod_base = OTHER; note = 2'-fluoro guanosine
  modified_base 13: mod_base = OTHER; note = 2'O-methyl guanosine
  modified_base 14: mod_base = OTHER; note = 2'-fluoro adenosine
  modified_base 15: mod_base = OTHER; note = 2'O-methyl guanosine
  modified_base 16: mod_base = OTHER; note = 2'-fluoro guanosine
  modified_base 17: mod_base = OTHER; note = 2'O-methyl uridine
  modified_base 18: mod_base = OTHER; note = 2'-fluoro guanosine
  modified_base 19: mod_base = OTHER; note = 2'O-methyl cytidine
  modified_base 20: mod_base = OTHER; note = 2'-fluoro guanosine
  modified_base 21: mod_base = OTHER; note = 2'O-methyl guanosine phosphorothioate
  modified_base 22: mod_base = OTHER; note = 2'O-methyl uridine phosphorothioate
  modified_base 23: mod_base = OTHER; note = 2'O-methyl uridine
cgcgtcgcggaggaggtgcggtt

SEQ ID NO: 1759 - RNA, 23 nt, synthetic construct
  source 1..23: mol_type = other RNA
  modified_base 1: mod_base = OTHER; note = 5' vinyl phosphonate 2'O-methyl guanosine phosphorothioate
  modified_base 2: mod_base = OTHER; note = 2'-fluoro cytidine phosphorothioate
  modified_base 3: mod_base = OTHER; note = 2'O-methyl guanosine
  modified_base 4: mod_base = OTHER; note = 2'-fluoro cytidine
  modified_base 5: mod_base = OTHER; note = 2'O-methyl guanosine
  modified_base 6: mod_base = OTHER; note = 2'-fluoro uridine
  modified_base 7: mod_base = OTHER; note = 2'O-methyl cytidine
  modified_base 8: mod_base = OTHER; note = 2'-fluoro guanosine
  modified_base 9: mod_base = OTHER; note = 2'O-methyl cytidine
  modified_base 10: mod_base = OTHER; note = 2'-fluoro guanosine
  modified_base 11: mod_base = OTHER; note = 2'O-methyl guanosine
  modified_base 12: mod_base = OTHER; note = 2'-fluoro adenosine
  modified_base 13: mod_base = OTHER; note = 2'O-methyl guanosine
  modified_base 14: mod_base = OTHER; note = 2'-fluoro guanosine
  modified_base 15: mod_base = OTHER; note = 2'O-methyl adenosine
  modified_base 16: mod_base = OTHER; note = 2'-fluoro guanosine
  modified_base 17: mod_base = OTHER; note = 2'O-methyl guanosine
  modified_base 18: mod_base = OTHER; note = 2'-fluoro uridine
  modified_base 19: mod_base = OTHER; note = 2'O-methyl guanosine
  modified_base 20: mod_base = OTHER; note = 2'-fluoro cytidine
  modified_base 21: mod_base = OTHER; note = 2'O-methyl guanosine phosphorothioate
  modified_base 22: mod_base = OTHER; note = 2'O-methyl uridine phosphorothioate
  modified_base 23: mod_base = OTHER; note = 2'O-methyl uridine
gcgcgtcgcggaggaggtgcgtt

SEQ ID NO: 1760 - RNA, 23 nt, synthetic construct
  source 1..23: mol_type = other RNA
  modified_base 1: mod_base = OTHER; note = 5' vinyl phosphonate 2'O-methyl guanosine phosphorothioate
  modified_base 2: mod_base = OTHER; note = 2'-fluoro cytidine phosphorothioate
  modified_base 3: mod_base = OTHER; note = 2'O-methyl guanosine
  modified_base 4: mod_base = OTHER; note = 2'-fluoro cytidine
  modified_base 5: mod_base = OTHER; note = 2'O-methyl guanosine
  modified_base 6: mod_base = OTHER; note = 2'-fluoro cytidine
  modified_base 7: mod_base = OTHER; note = 2'O-methyl guanosine
  modified_base 8: mod_base = OTHER; note = 2'-fluoro uridine
  modified_base 9: mod_base = OTHER; note = 2'O-methyl cytidine
  modified_base 10: mod_base = OTHER; note = 2'-fluoro guanosine
  modified_base 11: mod_base = OTHER; note = 2'O-methyl cytidine
  modified_base 12: mod_base = OTHER; note = 2'-fluoro guanosine
  modified_base 13: mod_base = OTHER; note = 2'O-methyl guanosine
  modified_base 14: mod_base = OTHER; note = 2'-fluoro adenosine
  modified_base 15: mod_base = OTHER; note = 2'O-methyl guanosine
  modified_base 16: mod_base = OTHER; note = 2'-fluoro guanosine
  modified_base 17: mod_base = OTHER; note = 2'O-methyl adenosine
  modified_base 18: mod_base = OTHER; note = 2'-fluoro guanosine
  modified_base 19: mod_base = OTHER; note = 2'O-methyl guanosine
  modified_base 20: mod_base = OTHER; note = 2'-fluoro uridine
  modified_base 21: mod_base = OTHER; note = 2'O-methyl guanosine phosphorothioate
  modified_base 22: mod_base = OTHER; note = 2'O-methyl uridine phosphorothioate
  modified_base 23: mod_base = OTHER; note = 2'O-methyl uridine
gcgcgcgtcgcggaggaggtgtt

SEQ ID NO: 1761 - RNA, 23 nt, synthetic construct
  source 1..23: mol_type = other RNA
  modified_base 1: mod_base = OTHER; note = 5' vinyl phosphonate 2'O-methyl adenosine phosphorothioate
  modified_base 2: mod_base = OTHER; note = 2'-fluoro uridine phosphorothioate
  modified_base 3: mod_base = OTHER; note = 2'O-methyl guanosine
  modified_base 4: mod_base = OTHER; note = 2'-fluoro cytidine
  modified_base 5: mod_base = OTHER; note = 2'O-methyl guanosine
  modified_base 6: mod_base = OTHER; note = 2'-fluoro cytidine
  modified_base 7: mod_base = OTHER; note = 2'O-methyl guanosine
  modified_base 8: mod_base = OTHER; note = 2'-fluoro cytidine
  modified_base 9: mod_base = OTHER; note = 2'O-methyl guanosine
  modified_base 10: mod_base = OTHER; note = 2'-fluoro uridine
  modified_base 11: mod_base = OTHER; note = 2'O-methyl cytidine
  modified_base 12: mod_base = OTHER; note = 2'-fluoro guanosine
  modified_base 13: mod_base = OTHER; note = 2'O-methyl cytidine
  modified_base 14: mod_base = OTHER; note = 2'-fluoro guanosine
  modified_base 15: mod_base = OTHER; note = 2'O-methyl guanosine
  modified_base 16: mod_base = OTHER; note = 2'-fluoro adenosine
  modified_base 17: mod_base = OTHER; note = 2'O-methyl guanosine
  modified_base 18: mod_base = OTHER; note = 2'-fluoro guanosine
  modified_base 19: mod_base = OTHER; note = 2'O-methyl adenosine
  modified_base 20: mod_base = OTHER; note = 2'-fluoro guanosine
  modified_base 21: mod_base = OTHER; note = 2'O-methyl guanosine phosphorothioate
  modified_base 22: mod_base = OTHER; note = 2'O-methyl uridine phosphorothioate
  modified_base 23: mod_base = OTHER; note = 2'O-methyl uridine
atgcgcgcgtcgcggaggaggtt

SEQ ID NO: 1762 - RNA, 23 nt, synthetic construct
  source 1..23: mol_type = other RNA
  modified_base 1: mod_base = OTHER; note = 5' vinyl phosphonate 2'O-methyl cytidine phosphorothioate
  modified_base 2: mod_base = OTHER; note = 2'-fluoro adenosine phosphorothioate
  modified_base 3: mod_base = OTHER; note = 2'O-methyl uridine
  modified_base 4: mod_base = OTHER; note = 2'-fluoro guanosine
  modified_base 5: mod_base = OTHER; note = 2'O-methyl cytidine
  modified_base 6: mod_base = OTHER; note = 2'-fluoro guanosine
  modified_base 7: mod_base = OTHER; note = 2'O-methyl cytidine
  modified_base 8: mod_base = OTHER; note = 2'-fluoro guanosine
  modified_base 9: mod_base = OTHER; note = 2'O-methyl cytidine
  modified_base 10: mod_base = OTHER; note = 2'-fluoro guanosine
  modified_base 11: mod_base = OTHER; note = 2'O-methyl uridine
  modified_base 12: mod_base = OTHER; note = 2'-fluoro cytidine
  modified_base 13: mod_base = OTHER; note = 2'O-methyl guanosine
  modified_base 14: mod_base = OTHER; note = 2'-fluoro cytidine
  modified_base 15: mod_base = OTHER; note = 2'O-methyl guanosine
  modified_base 16: mod_base = OTHER; note = 2'-fluoro guanosine
  modified_base 17: mod_base = OTHER; note = 2'O-methyl adenosine
  modified_base 18: mod_base = OTHER; note = 2'-fluoro guanosine
  modified_base 19: mod_base = OTHER; note = 2'O-methyl guanosine
  modified_base 20: mod_base = OTHER; note = 2'-fluoro adenosine
  modified_base 21: mod_base = OTHER; note = 2'O-methyl guanosine phosphorothioate
  modified_base 22: mod_base = OTHER; note = 2'O-methyl uridine phosphorothioate
  modified_base 23: mod_base = OTHER; note = 2'O-methyl uridine
catgcgcgcgtcgcggaggagtt

SEQ ID NO: 1763 - RNA, 23 nt, synthetic construct
  source 1..23: mol_type = other RNA
  modified_base 1: mod_base = OTHER; note = 5' vinyl phosphonate 2'O-methyl adenosine phosphorothioate
  modified_base 2: mod_base = OTHER; note = 2'-fluoro cytidine phosphorothioate
  modified_base 3: mod_base = OTHER; note = 2'O-methyl adenosine
  modified_base 4: mod_base = OTHER; note = 2'-fluoro uridine
  modified_base 5: mod_base = OTHER; note = 2'O-methyl guanosine
  modified_base 6: mod_base = OTHER; note = 2'-fluoro cytidine
  modified_base 7: mod_base = OTHER; note = 2'O-methyl guanosine
  modified_base 8: mod_base = OTHER; note = 2'-fluoro cytidine
  modified_base 9: mod_base = OTHER; note = 2'O-methyl guanosine
  modified_base 10: mod_base = OTHER; note = 2'-fluoro cytidine
  modified_base 11: mod_base = OTHER; note = 2'O-methyl guanosine
  modified_base 12: mod_base = OTHER; note = 2'-fluoro uridine
  modified_base 13: mod_base = OTHER; note = 2'O-methyl cytidine
  modified_base 14: mod_base = OTHER; note = 2'-fluoro guanosine
  modified_base 15: mod_base = OTHER; note = 2'O-methyl cytidine
  modified_base 16: mod_base = OTHER; note = 2'-fluoro guanosine
  modified_base 17: mod_base = OTHER; note = 2'O-methyl guanosine
  modified_base 18: mod_base = OTHER; note = 2'-fluoro adenosine
  modified_base 19: mod_base = OTHER; note = 2'O-methyl guanosine
  modified_base 20: mod_base = OTHER; note = 2'-fluoro guanosine
  modified_base 21: mod_base = OTHER; note = 2'O-methyl adenosine phosphorothioate
  modified_base 22: mod_base = OTHER; note = 2'O-methyl uridine phosphorothioate
  modified_base 23: mod_base = OTHER; note = 2'O-methyl uridine
acatgcgcgcgtcgcggaggatt

SEQ ID NO: 1764 - RNA, 23 nt, synthetic construct
  source 1..23: mol_type = other RNA
  modified_base 1: mod_base = OTHER; note = 5' vinyl phosphonate 2'O-methyl adenosine phosphorothioate
  modified_base 2: mod_base = OTHER; note = 2'-fluoro adenosine phosphorothioate
  modified_base 3: mod_base = OTHER; note = 2'O-methyl cytidine
  modified_base 4: mod_base = OTHER; note = 2'-fluoro adenosine
  modified_base 5: mod_base = OTHER; note = 2'O-methyl uridine
  modified_base 6: mod_base = OTHER; note = 2'-fluoro guanosine
  modified_base 7: mod_base = OTHER; note = 2'O-methyl cytidine
  modified_base 8: mod_base = OTHER; note = 2'-fluoro guanosine
  modified_base 9: mod_base = OTHER; note = 2'O-methyl cytidine
  modified_base 10: mod_base = OTHER; note = 2'-fluoro guanosine
  modified_base 11: mod_base = OTHER; note = 2'O-methyl cytidine
  modified_base 12: mod_base = OTHER; note = 2'-fluoro guanosine
  modified_base 13: mod_base = OTHER; note = 2'O-methyl uridine
  modified_base 14: mod_base = OTHER; note = 2'-fluoro cytidine
  modified_base 15: mod_base = OTHER; note = 2'O-methyl guanosine
  modified_base 16: mod_base = OTHER; note = 2'-fluoro cytidine
  modified_base 17: mod_base = OTHER; note = 2'O-methyl guanosine
  modified_base 18: mod_base = OTHER; note = 2'-fluoro guanosine
  modified_base 19: mod_base = OTHER; note = 2'O-methyl adenosine
  modified_base 20: mod_base = OTHER; note = 2'-fluoro guanosine
  modified_base 21: mod_base = OTHER; note = 2'O-methyl guanosine phosphorothioate
  modified_base 22: mod_base = OTHER; note = 2'O-methyl uridine phosphorothioate
  modified_base 23: mod_base = OTHER; note = 2'O-methyl uridine
aacatgcgcgcgtcgcggaggtt

SEQ ID NO: 1765 - RNA, 23 nt, synthetic construct
  source 1..23: mol_type = other RNA
  modified_base 1: mod_base = OTHER; note = 5' vinyl phosphonate 2'O-methyl cytidine phosphorothioate
  modified_base 2: mod_base = OTHER; note = 2'-fluoro adenosine phosphorothioate
  modified_base 3: mod_base = OTHER; note = 2'O-methyl adenosine
  modified_base 4: mod_base = OTHER; note = 2'-fluoro cytidine
  modified_base 5: mod_base = OTHER; note = 2'O-methyl adenosine
  modified_base 6: mod_base = OTHER; note = 2'-fluoro uridine
  modified_base 7: mod_base = OTHER; note = 2'O-methyl guanosine
  modified_base 8: mod_base = OTHER; note = 2'-fluoro cytidine
  modified_base 9: mod_base = OTHER; note = 2'O-methyl guanosine
  modified_base 10: mod_base = OTHER; note = 2'-fluoro cytidine
  modified_base 11: mod_base = OTHER; note = 2'O-methyl guanosine
  modified_base 12: mod_base = OTHER; note = 2'-fluoro cytidine
  modified_base 13: mod_base = OTHER; note = 2'O-methyl guanosine
  modified_base 14: mod_base = OTHER; note = 2'-fluoro uridine
  modified_base 15: mod_base = OTHER; note = 2'O-methyl cytidine
  modified_base 16: mod_base = OTHER; note = 2'-fluoro guanosine
  modified_base 17: mod_base = OTHER; note = 2'O-methyl cytidine
  modified_base 18: mod_base = OTHER; note = 2'-fluoro guanosine
  modified_base 19: mod_base = OTHER; note = 2'O-methyl guanosine
  modified_base 20: mod_base = OTHER; note = 2'-fluoro adenosine
  modified_base 21: mod_base = OTHER; note = 2'O-methyl guanosine phosphorothioate
  modified_base 22: mod_base = OTHER; note = 2'O-methyl uridine phosphorothioate
  modified_base 23: mod_base = OTHER; note = 2'O-methyl uridine
caacatgcgcgcgtcgcggagtt

SEQ ID NO: 1766 - RNA, 23 nt, synthetic construct
  source 1..23: mol_type = other RNA
  modified_base 1: mod_base = OTHER; note = 5' vinyl phosphonate 2'O-methyl adenosine phosphorothioate
  modified_base 2: mod_base = OTHER; note = 2'-fluoro cytidine phosphorothioate
  modified_base 3: mod_base = OTHER; note = 2'O-methyl adenosine
  modified_base 4: mod_base = OTHER; note = 2'-fluoro adenosine
  modified_base 5: mod_base = OTHER; note = 2'O-methyl cytidine
  modified_base 6: mod_base = OTHER; note = 2'-fluoro adenosine
  modified_base 7: mod_base = OTHER; note = 2'O-methyl uridine
  modified_base 8: mod_base = OTHER; note = 2'-fluoro guanosine
  modified_base 9: mod_base = OTHER; note = 2'O-methyl cytidine
  modified_base 10: mod_base = OTHER; note = 2'-fluoro guanosine
  modified_base 11: mod_base = OTHER; note = 2'O-methyl cytidine
  modified_base 12: mod_base = OTHER; note = 2'-fluoro guanosine
  modified_base 13: mod_base = OTHER; note = 2'O-methyl cytidine
  modified_base 14: mod_base = OTHER; note = 2'-fluoro guanosine
  modified_base 15: mod_base = OTHER; note = 2'O-methyl uridine
  modified_base 16: mod_base = OTHER; note = 2'-fluoro cytidine
  modified_base 17: mod_base = OTHER; note = 2'O-methyl guanosine
  modified_base 18: mod_base = OTHER; note = 2'-fluoro cytidine
  modified_base 19: mod_base = OTHER; note = 2'O-methyl guanosine
  modified_base 20: mod_base = OTHER; note = 2'-fluoro guanosine
  modified_base 21: mod_base = OTHER; note = 2'O-methyl adenosine phosphorothioate
  modified_base 22: mod_base = OTHER; note = 2'O-methyl uridine phosphorothioate
  modified_base 23: mod_base = OTHER; note = 2'O-methyl uridine
acaacatgcgcgcgtcgcggatt

SEQ ID NO: 1767 - RNA, 23 nt, synthetic construct
  source 1..23: mol_type = other RNA
  modified_base 1: mod_base = OTHER; note = 5' vinyl phosphonate 2'O-methyl adenosine phosphorothioate
  modified_base 2: mod_base = OTHER; note = 2'-fluoro adenosine phosphorothioate
  modified_base 3: mod_base = OTHER; note = 2'O-methyl cytidine
  modified_base 4: mod_base = OTHER; note = 2'-fluoro adenosine
  modified_base 5: mod_base = OTHER; note = 2'O-methyl adenosine
  modified_base 6: mod_base = OTHER; note = 2'-fluoro cytidine
  modified_base 7: mod_base = OTHER; note = 2'O-methyl adenosine
  modified_base 8: mod_base = OTHER; note = 2'-fluoro uridine
  modified_base 9: mod_base = OTHER; note = 2'O-methyl guanosine
  modified_base 10: mod_base = OTHER; note = 2'-fluoro cytidine
  modified_base 11: mod_base = OTHER; note = 2'O-methyl guanosine
  modified_base 12: mod_base = OTHER; note = 2'-fluoro cytidine
  modified_base 13: mod_base = OTHER; note = 2'O-methyl guanosine
  modified_base 14: mod_base = OTHER; note = 2'-fluoro cytidine
  modified_base 15: mod_base = OTHER; note = 2'O-methyl guanosine
  modified_base 16: mod_base = OTHER; note = 2'-fluoro uridine
  modified_base 17: mod_base = OTHER; note = 2'O-methyl cytidine
  modified_base 18: mod_base = OTHER; note = 2'-fluoro guanosine
  modified_base 19: mod_base = OTHER; note = 2'O-methyl cytidine
  modified_base 20: mod_base = OTHER; note = 2'-fluoro guanosine
  modified_base 21: mod_base = OTHER; note = 2'O-methyl guanosine phosphorothioate
  modified_base 22: mod_base = OTHER; note = 2'O-methyl uridine phosphorothioate
  modified_base 23: mod_base = OTHER; note = 2'O-methyl uridine
aacaacatgcgcgcgtcgcggtt

SEQ ID NO: 1768 - RNA, 23 nt, synthetic construct
  source 1..23: mol_type = other RNA
  modified_base 1: mod_base = OTHER; note = 5' vinyl phosphonate 2'O-methyl cytidine phosphorothioate
  modified_base 2: mod_base = OTHER; note = 2'-fluoro guanosine phosphorothioate
  modified_base 3: mod_base = OTHER; note = 2'O-methyl adenosine
  modified_base 4: mod_base = OTHER; note = 2'-fluoro adenosine
  modified_base 5: mod_base = OTHER; note = 2'O-methyl cytidine
  modified_base 6: mod_base = OTHER; note = 2'-fluoro adenosine
  modified_base 7: mod_base = OTHER; note = 2'O-methyl adenosine
  modified_base 8: mod_base = OTHER; note = 2'-fluoro cytidine
  modified_base 9: mod_base = OTHER; note = 2'O-methyl adenosine
  modified_base 10: mod_base = OTHER; note = 2'-fluoro uridine
  modified_base 11: mod_base = OTHER; note = 2'O-methyl guanosine
  modified_base 12: mod_base = OTHER; note = 2'-fluoro cytidine
  modified_base 13: mod_base = OTHER; note = 2'O-methyl guanosine
  modified_base 14: mod_base = OTHER; note = 2'-fluoro cytidine
  modified_base 15: mod_base = OTHER; note = 2'O-methyl guanosine
  modified_base 16: mod_base = OTHER; note = 2'-fluoro cytidine
  modified_base 17: mod_base = OTHER; note = 2'O-methyl guanosine
  modified_base 18: mod_base = OTHER; note = 2'-fluoro uridine
  modified_base 19: mod_base = OTHER; note = 2'O-methyl cytidine
  modified_base 20: mod_base = OTHER; note = 2'-fluoro guanosine
  modified_base 21: mod_base = OTHER; note = 2'O-methyl cytidine phosphorothioate
  modified_base 22: mod_base = OTHER; note = 2'O-methyl uridine phosphorothioate
  modified_base 23: mod_base = OTHER; note = 2'O-methyl uridine
cgaacaacatgcgcgcgtcgctt

SEQ ID NO: 1769 - RNA, 23 nt, synthetic construct
  source 1..23: mol_type = other RNA
  modified_base 1: mod_base = OTHER; note = 5' vinyl phosphonate 2'O-methyl cytidine phosphorothioate
  modified_base 2: mod_base = OTHER; note = 2'-fluoro cytidine phosphorothioate
  modified_base 3: mod_base = OTHER; note = 2'O-methyl guanosine
  modified_base 4: mod_base = OTHER; note = 2'-fluoro adenosine
  modified_base 5: mod_base = OTHER; note = 2'O-methyl adenosine
  modified_base 6: mod_base = OTHER; note = 2'-fluoro cytidine
  modified_base 7: mod_base = OTHER; note = 2'O-methyl adenosine
  modified_base 8: mod_base = OTHER; note = 2'-fluoro adenosine
  modified_base 9: mod_base = OTHER; note = 2'O-methyl cytidine
  modified_base 10: mod_base = OTHER; note = 2'-fluoro adenosine
  modified_base 11: mod_base = OTHER; note = 2'O-methyl uridine
  modified_base 12: mod_base = OTHER; note = 2'-fluoro guanosine
  modified_base 13: mod_base = OTHER; note = 2'O-methyl cytidine
  modified_base 14: mod_base = OTHER; note = 2'-fluoro guanosine
  modified_base 15: mod_base = OTHER; note = 2'O-methyl cytidine
  modified_base 16: mod_base = OTHER; note = 2'-fluoro guanosine
  modified_base 17: mod_base = OTHER; note = 2'O-methyl cytidine
  modified_base 18: mod_base = OTHER; note = 2'-fluoro guanosine
  modified_base 19: mod_base = OTHER; note = 2'O-methyl uridine
  modified_base 20: mod_base = OTHER; note = 2'-fluoro cytidine
  modified_base 21: mod_base = OTHER; note = 2'O-methyl guanosine phosphorothioate
  modified_base 22: mod_base = OTHER; note = 2'O-methyl uridine phosphorothioate
  modified_base 23: mod_base = OTHER; note = 2'O-methyl uridine
ccgaacaacatgcgcgcgtcgtt

SEQ ID NO: 1770 - RNA, 23 nt, synthetic construct
  source 1..23: mol_type = other RNA
  modified_base 1: mod_base = OTHER; note = 5' vinyl phosphonate 2'O-methyl guanosine phosphorothioate
  modified_base 2: mod_base = OTHER; note = 2'-fluoro cytidine phosphorothioate
  modified_base 3: mod_base = OTHER; note = 2'O-methyl cytidine
  modified_base 4: mod_base = OTHER; note = 2'-fluoro guanosine
  modified_base 5: mod_base = OTHER; note = 2'O-methyl adenosine
  modified_base 6: mod_base = OTHER; note = 2'-fluoro adenosine
  modified_base 7: mod_base = OTHER; note = 2'O-methyl cytidine
  modified_base 8: mod_base = OTHER; note = 2'-fluoro adenosine
  modified_base 9: mod_base = OTHER; note = 2'O-methyl adenosine
  modified_base 10: mod_base = OTHER; note = 2'-fluoro cytidine
  modified_base 11: mod_base = OTHER; note = 2'O-methyl adenosine
  modified_base 12: mod_base = OTHER; note = 2'-fluoro uridine
  modified_base 13: mod_base = OTHER; note = 2'O-methyl guanosine
  modified_base 14: mod_base = OTHER; note = 2'-fluoro cytidine
  modified_base 15: mod_base = OTHER; note = 2'O-methyl guanosine
  modified_base 16: mod_base = OTHER; note = 2'-fluoro cytidine
  modified_base 17: mod_base = OTHER; note = 2'O-methyl guanosine
  modified_base 18: mod_base = OTHER; note = 2'-fluoro cytidine
  modified_base 19: mod_base = OTHER; note = 2'O-methyl guanosine
  modified_base 20: mod_base = OTHER; note = 2'-fluoro uridine
  modified_base 21: mod_base = OTHER; note = 2'O-methyl cytidine phosphorothioate
  modified_base 22: mod_base = OTHER; note = 2'O-methyl uridine phosphorothioate
  modified_base 23: mod_base = OTHER; note = 2'O-methyl uridine
gccgaacaacatgcgcgcgtctt

SEQ ID NO: 1771 - RNA, 23 nt, synthetic construct
  source 1..23: mol_type = other RNA
  modified_base 1: mod_base = OTHER; note = 5' vinyl phosphonate 2'O-methyl cytidine phosphorothioate
  modified_base 2: mod_base = OTHER; note = 2'-fluoro uridine phosphorothioate
  modified_base 3: mod_base = OTHER; note = 2'O-methyl cytidine
  modified_base 4: mod_base = OTHER; note = 2'-fluoro cytidine
  modified_base 5: mod_base = OTHER; note = 2'O-methyl uridine
  modified_base 6: mod_base = OTHER; note = 2'-fluoro guanosine
  modified_base 7: mod_base = OTHER; note = 2'O-methyl guanosine
  modified_base 8: mod_base = OTHER; note = 2'-fluoro cytidine
  modified_base 9: mod_base = OTHER; note = 2'O-methyl cytidine
  modified_base 10: mod_base = OTHER; note = 2'-fluoro uridine
  modified_base 11: mod_base = OTHER; note = 2'O-methyl uridine
  modified_base 12: mod_base = OTHER; note = 2'-fluoro cytidine
  modified_base 13: mod_base = OTHER; note = 2'O-methyl cytidine
  modified_base 14: mod_base = OTHER; note = 2'-fluoro guanosine
  modified_base 15: mod_base = OTHER; note = 2'O-methyl cytidine
  modified_base 16: mod_base = OTHER; note = 2'-fluoro adenosine
  modified_base 17: mod_base = OTHER; note = 2'O-methyl cytidine
  modified_base 18: mod_base = OTHER; note = 2'-fluoro adenosine
  modified_base 19: mod_base = OTHER; note = 2'O-methyl adenosine
  modified_base 20: mod_base = OTHER; note = 2'-fluoro guanosine
  modified_base 21: mod_base = OTHER; note = 2'O-methyl adenosine phosphorothioate
  modified_base 22: mod_base = OTHER; note = 2'O-methyl uridine phosphorothioate
  modified_base 23: mod_base = OTHER; note = 2'O-methyl uridine
ctcctggccttccgcacaagatt

SEQ ID NO: 1772 - RNA, 23 nt, synthetic construct
  source 1..23: mol_type = other RNA
  modified_base 1: mod_base = OTHER; note = 5' vinyl phosphonate 2'O-methyl adenosine phosphorothioate
  modified_base 2: mod_base = OTHER; note = 2'-fluoro cytidine phosphorothioate
  modified_base 3: mod_base = OTHER; note = 2'O-methyl uridine
  modified_base 4: mod_base = OTHER; note = 2'-fluoro cytidine
  modified_base 5: mod_base = OTHER; note = 2'O-methyl cytidine
  modified_base 6: mod_base = OTHER; note = 2'-fluoro uridine
  modified_base 7: mod_base = OTHER; note = 2'O-methyl guanosine
  modified_base 8: mod_base = OTHER; note = 2'-fluoro guanosine
  modified_base 9: mod_base = OTHER; note = 2'O-methyl cytidine
  modified_base 10: mod_base = OTHER; note = 2'-fluoro cytidine
  modified_base 11: mod_base = OTHER; note = 2'O-methyl uridine
  modified_base 12: mod_base = OTHER; note = 2'-fluoro uridine
  modified_base 13: mod_base = OTHER; note = 2'O-methyl cytidine
  modified_base 14: mod_base = OTHER; note = 2'-fluoro cytidine
  modified_base 15: mod_base = OTHER; note = 2'O-methyl guanosine
  modified_base 16: mod_base = OTHER; note = 2'-fluoro cytidine
  modified_base 17: mod_base = OTHER; note = 2'O-methyl adenosine
  modified_base 18: mod_base = OTHER; note = 2'-fluoro cytidine
  modified_base 19: mod_base = OTHER; note = 2'O-methyl adenosine
  modified_base 20: mod_base = OTHER; note = 2'-fluoro adenosine
  modified_base 21: mod_base = OTHER; note = 2'O-methyl guanosine phosphorothioate
  modified_base 22: mod_base = OTHER; note = 2'O-methyl uridine phosphorothioate
  modified_base 23: mod_base = OTHER; note = 2'O-methyl uridine
actcctggccttccgcacaagtt

SEQ ID NO: 1773 - RNA, 23 nt, synthetic construct
  source 1..23: mol_type = other RNA
  modified_base 1: mod_base = OTHER; note = 5' vinyl phosphonate 2'O-methyl cytidine phosphorothioate
  modified_base 2: mod_base = OTHER; note = 2'-fluoro guanosine phosphorothioate
  modified_base 3: mod_base = OTHER; note = 2'O-methyl adenosine
  modified_base 4: mod_base = OTHER; note = 2'-fluoro cytidine
  modified_base 5: mod_base = OTHER; note = 2'O-methyl uridine
  modified_base 6: mod_base = OTHER; note = 2'-fluoro cytidine
  modified_base 7: mod_base = OTHER; note = 2'O-methyl cytidine
  modified_base 8: mod_base = OTHER; note = 2'-fluoro uridine
  modified_base 9: mod_base = OTHER; note = 2'O-methyl guanosine
  modified_base 10: mod_base = OTHER; note = 2'-fluoro guanosine
  modified_base 11: mod_base = OTHER; note = 2'O-methyl cytidine
  modified_base 12: mod_base = OTHER; note = 2'-fluoro cytidine
  modified_base 13: mod_base = OTHER; note = 2'O-methyl uridine
  modified_base 14: mod_base = OTHER; note = 2'-fluoro uridine
  modified_base 15: mod_base = OTHER; note = 2'O-methyl cytidine
  modified_base 16: mod_base = OTHER; note = 2'-fluoro cytidine
  modified_base 17: mod_base = OTHER; note = 2'O-methyl guanosine
  modified_base 18: mod_base = OTHER; note = 2'-fluoro cytidine
  modified_base 19: mod_base = OTHER; note = 2'O-methyl adenosine
  modified_base 20: mod_base = OTHER; note = 2'-fluoro cytidine
  modified_base 21: mod_base = OTHER; note = 2'O-methyl adenosine phosphorothioate
  modified_base 22: mod_base = OTHER; note = 2'O-methyl uridine phosphorothioate
  modified_base 23: mod_base = OTHER; note = 2'O-methyl uridine
cgactcctggccttccgcacatt

SEQ ID NO: 1774 - RNA, 23 nt, synthetic construct
  source 1..23: mol_type = other RNA
  modified_base 1: mod_base = OTHER; note = 5' vinyl phosphonate 2'O-methyl uridine phosphorothioate
  modified_base 2: mod_base = OTHER; note = 2'-fluoro cytidine phosphorothioate
  modified_base 3: mod_base = OTHER; note = 2'O-methyl cytidine
  modified_base 4: mod_base = OTHER; note = 2'-fluoro guanosine
  modified_base 5: mod_base = OTHER; note = 2'O-methyl adenosine
  modified_base 6: mod_base = OTHER; note = 2'-fluoro cytidine
  modified_base 7: mod_base = OTHER; note = 2'O-methyl uridine
  modified_base 8: mod_base = OTHER; note = 2'-fluoro cytidine
  modified_base 9: mod_base = OTHER; note = 2'O-methyl cytidine
  modified_base 10: mod_base = OTHER; note = 2'-fluoro uridine
  modified_base 11: mod_base = OTHER; note = 2'O-methyl guanosine
  modified_base 12: mod_base = OTHER; note = 2'-fluoro guanosine
  modified_base 13: mod_base = OTHER; note = 2'O-methyl cytidine
  modified_base 14: mod_base = OTHER; note = 2'-fluoro cytidine
  modified_base 15: mod_base = OTHER; note = 2'O-methyl uridine
  modified_base 16: mod_base = OTHER; note = 2'-fluoro uridine
  modified_base 17: mod_base = OTHER; note = 2'O-methyl cytidine
  modified_base 18: mod_base = OTHER; note = 2'-fluoro cytidine
  modified_base 19: mod_base = OTHER; note = 2'O-methyl guanosine
  modified_base 20: mod_base = OTHER; note = 2'-fluoro cytidine
  modified_base 21: mod_base = OTHER; note = 2'O-methyl adenosine phosphorothioate
  modified_base 22: mod_base = OTHER; note = 2'O-methyl uridine phosphorothioate
  modified_base 23: mod_base = OTHER; note = 2'O-methyl uridine
tccgactcctggccttccgcatt

SEQ ID NO: 1775 - RNA, 23 nt, synthetic construct
  source 1..23: mol_type = other RNA
  modified_base 1: mod_base = OTHER; note = 5' vinyl phosphonate 2'O-methyl guanosine phosphorothioate
  modified_base 2: mod_base = OTHER; note = 2'-fluoro uridine phosphorothioate
  modified_base 3: mod_base = OTHER; note = 2'O-methyl uridine
  modified_base 4: mod_base = OTHER; note = 2'-fluoro cytidine
  modified_base 5: mod_base = OTHER; note = 2'O-methyl cytidine
  modified_base 6: mod_base = OTHER; note = 2'-fluoro guanosine
  modified_base 7: mod_base = OTHER; note = 2'O-methyl adenosine
  modified_base 8: mod_base = OTHER; note = 2'-fluoro cytidine
  modified_base 9: mod_base = OTHER; note = 2'O-methyl uridine
  modified_base 10: mod_base = OTHER; note = 2'-fluoro cytidine
  modified_base 11: mod_base = OTHER; note = 2'O-methyl cytidine
  modified_base 12: mod_base = OTHER; note = 2'-fluoro uridine
  modified_base 13: mod_base = OTHER; note = 2'O-methyl guanosine
  modified_base 14: mod_base = OTHER; note = 2'-fluoro guanosine
  modified_base 15: mod_base = OTHER; note = 2'O-methyl cytidine
  modified_base 16: mod_base = OTHER; note = 2'-fluoro cytidine
  modified_base 17: mod_base = OTHER; note = 2'O-methyl uridine
  modified_base 18: mod_base = OTHER; note = 2'-fluoro uridine
  modified_base 19: mod_base = OTHER; note = 2'O-methyl cytidine
  modified_base 20: mod_base = OTHER; note = 2'-fluoro cytidine
  modified_base 21: mod_base = OTHER; note = 2'O-methyl guanosine phosphorothioate
  modified_base 22: mod_base = OTHER; note = 2'O-methyl uridine phosphorothioate
  modified_base 23: mod_base = OTHER; note = 2'O-methyl uridine
gttccgactcctggccttccgtt

SEQ ID NO: 1776 - RNA, 23 nt, synthetic construct
  source 1..23: mol_type = other RNA
  modified_base 1: mod_base = OTHER; note = 5' vinyl phosphonate 2'O-methyl adenosine phosphorothioate
  modified_base 2: mod_base = OTHER; note = 2'-fluoro adenosine phosphorothioate
  modified_base 3: mod_base = OTHER; note = 2'O-methyl uridine
  modified_base 4: mod_base = OTHER; note = 2'-fluoro guanosine
  modified_base 5: mod_base = OTHER; note = 2'O-methyl uridine
  modified_base 6: mod_base = OTHER; note = 2'-fluoro uridine
  modified_base 7: mod_base = OTHER; note = 2'O-methyl cytidine
  modified_base 8: mod_base = OTHER; note = 2'-fluoro cytidine
  modified_base 9: mod_base = OTHER; note = 2'O-methyl guanosine
  modified_base 10: mod_base = OTHER; note = 2'-fluoro adenosine
  modified_base 11: mod_base = OTHER; note = 2'O-methyl cytidine
  modified_base 12: mod_base = OTHER; note = 2'-fluoro uridine
  modified_base 13: mod_base = OTHER; note = 2'O-methyl cytidine
  modified_base 14: mod_base = OTHER; note = 2'-fluoro cytidine
  modified_base 15: mod_base = OTHER; note = 2'O-methyl uridine
  modified_base 16: mod_base = OTHER; note = 2'-fluoro guanosine
  modified_base 17: mod_base = OTHER; note = 2'O-methyl guanosine
  modified_base 18: mod_base = OTHER; note = 2'-fluoro cytidine
  modified_base 19: mod_base = OTHER; note = 2'O-methyl cytidine
  modified_base 20: mod_base = OTHER; note = 2'-fluoro uridine
  modified_base 21: mod_base = OTHER; note = 2'O-methyl uridine phosphorothioate
  modified_base 22: mod_base = OTHER; note = 2'O-methyl uridine phosphorothioate
  modified_base 23: mod_base = OTHER; note = 2'O-methyl uridine
aatgttccgactcctggcctttt

SEQ ID NO: 1777 - RNA, 23 nt, synthetic construct
  source 1..23: mol_type = other RNA
  modified_base 1: mod_base = OTHER; note = 5' vinyl phosphonate 2'O-methyl cytidine phosphorothioate
  modified_base 2: mod_base = OTHER; note = 2'-fluoro adenosine phosphorothioate
  modified_base 3: mod_base = OTHER; note = 2'O-methyl adenosine
  modified_base 4: mod_base = OTHER; note = 2'-fluoro uridine
  modified_base 5: mod_base = OTHER; note = 2'O-methyl guanosine
  modified_base 6: mod_base = OTHER; note = 2'-fluoro uridine
  modified_base 7: mod_base = OTHER; note = 2'O-methyl uridine
  modified_base 8: mod_base = OTHER; note = 2'-fluoro cytidine
  modified_base 9: mod_base = OTHER; note = 2'O-methyl cytidine
  modified_base 10: mod_base = OTHER; note = 2'-fluoro guanosine
  modified_base 11: mod_base = OTHER; note = 2'O-methyl adenosine
  modified_base 12: mod_base = OTHER; note = 2'-fluoro cytidine
  modified_base 13: mod_base = OTHER; note = 2'O-methyl uridine
  modified_base 14: mod_base = OTHER; note = 2'-fluoro cytidine
  modified_base 15: mod_base = OTHER; note = 2'O-methyl cytidine
  modified_base 16: mod_base = OTHER; note = 2'-fluoro uridine
  modified_base 17: mod_base = OTHER; note = 2'O-methyl guanosine
  modified_base 18: mod_base = OTHER; note = 2'-fluoro guanosine
  modified_base 19: mod_base = OTHER; note = 2'O-methyl cytidine
  modified_base 20: mod_base = OTHER; note = 2'-fluoro cytidine
  modified_base 21: mod_base = OTHER; note = 2'O-methyl uridine phosphorothioate
  modified_base 22: mod_base = OTHER; note = 2'O-methyl uridine phosphorothioate
  modified_base 23: mod_base = OTHER; note = 2'O-methyl uridine
caatgttccgactcctggccttt

SEQ ID NO: 1778 - RNA, 23 nt, synthetic construct
  source 1..23: mol_type = other RNA
  modified_base 1: mod_base = OTHER; note = 5' vinyl phosphonate 2'O-methyl cytidine phosphorothioate
  modified_base 2: mod_base = OTHER; note = 2'-fluoro cytidine phosphorothioate
  modified_base 3: mod_base = OTHER; note = 2'O-methyl adenosine
  modified_base 4: mod_base = OTHER; note = 2'-fluoro adenosine
  modified_base 5: mod_base = OTHER; note = 2'O-methyl uridine
  modified_base 6: mod_base = OTHER; note = 2'-fluoro guanosine
  modified_base 7: mod_base = OTHER; note = 2'O-methyl uridine
  modified_base 8: mod_base = OTHER; note = 2'-fluoro uridine
  modified_base 9: mod_base = OTHER; note = 2'O-methyl cytidine
  modified_base 10: mod_base = OTHER; note = 2'-fluoro cytidine
  modified_base 11: mod_base = OTHER; note = 2'O-methyl guanosine
  modified_base 12: mod_base = OTHER; note = 2'-fluoro adenosine
  modified_base 13: mod_base = OTHER; note = 2'O-methyl cytidine
  modified_base 14: mod_base = OTHER; note = 2'-fluoro uridine
  modified_base 15: mod_base = OTHER; note = 2'O-methyl cytidine
  modified_base 16: mod_base = OTHER; note = 2'-fluoro cytidine
  modified_base 17: mod_base = OTHER; note = 2'O-methyl uridine
  modified_base 18: mod_base = OTHER; note = 2'-fluoro guanosine
  modified_base 19: mod_base = OTHER; note = 2'O-methyl guanosine
  modified_base 20: mod_base = OTHER; note = 2'-fluoro cytidine
  modified_base 21: mod_base = OTHER; note = 2'O-methyl cytidine phosphorothioate
  modified_base 22: mod_base = OTHER; note = 2'O-methyl uridine phosphorothioate
  modified_base 23: mod_base = OTHER; note = 2'O-methyl uridine
ccaatgttccgactcctggcctt

SEQ ID NO: 1779 - RNA, 23 nt, synthetic construct
  source 1..23: mol_type = other RNA
  modified_base 1: mod_base = OTHER; note = 5' vinyl phosphonate 2'O-methyl guanosine phosphorothioate
  modified_base 2: mod_base = OTHER; note = 2'-fluoro adenosine phosphorothioate
  modified_base 3: mod_base = OTHER; note = 2'O-methyl uridine
  modified_base 4: mod_base = OTHER; note = 2'-fluoro guanosine
  modified_base 5: mod_base = OTHER; note = 2'O-methyl cytidine
  modified_base 6: mod_base = OTHER; note = 2'-fluoro cytidine
  modified_base 7: mod_base = OTHER; note = 2'O-methyl adenosine
  modified_base 8: mod_base = OTHER; note = 2'-fluoro adenosine
  modified_base 9: mod_base = OTHER; note = 2'O-methyl uridine
  modified_base 10: mod_base = OTHER; note = 2'-fluoro guanosine
  modified_base 11: mod_base = OTHER; note = 2'O-methyl uridine
  modified_base 12: mod_base = OTHER; note = 2'-fluoro uridine
  modified_base 13: mod_base = OTHER; note = 2'O-methyl cytidine
  modified_base 14: mod_base = OTHER; note = 2'-fluoro cytidine
  modified_base 15: mod_base = OTHER; note = 2'O-methyl guanosine
  modified_base 16: mod_base = OTHER; note = 2'-fluoro adenosine
  modified_base 17: mod_base = OTHER; note = 2'O-methyl cytidine
  modified_base 18: mod_base = OTHER; note = 2'-fluoro uridine
  modified_base 19: mod_base = OTHER; note = 2'O-methyl cytidine
  modified_base 20: mod_base = OTHER; note = 2'-fluoro cytidine
  modified_base 21: mod_base = OTHER; note = 2'O-methyl uridine phosphorothioate
  modified_base 22: mod_base = OTHER; note = 2'O-methyl uridine phosphorothioate
  modified_base 23: mod_base = OTHER; note = 2'O-methyl uridine
gatgccaatgttccgactccttt

SEQ ID NO: 1780 - RNA, 23 nt, synthetic construct
  source 1..23: mol_type = other RNA
  modified_base 1: mod_base = OTHER; note = 5' vinyl phosphonate 2'O-methyl adenosine phosphorothioate
  modified_base 2: mod_base = OTHER; note = 2'-fluoro guanosine phosphorothioate
  modified_base 3: mod_base = OTHER; note = 2'O-methyl adenosine
  modified_base 4: mod_base = OTHER; note = 2'-fluoro uridine
  modified_base 5: mod_base = OTHER; note = 2'O-methyl guanosine
  modified_base 6: mod_base = OTHER; note = 2'-fluoro adenosine
  modified_base 7: mod_base = OTHER; note = 2'O-methyl guanosine
  modified_base 8: mod_base = OTHER; note = 2'-fluoro cytidine
  modified_base 9: mod_base = OTHER; note = 2'O-methyl uridine
  modified_base 10: mod_base = OTHER; note = 2'-fluoro guanosine
  modified_base 11: mod_base = OTHER; note = 2'O-methyl guanosine
  modified_base 12: mod_base = OTHER; note = 2'-fluoro uridine
  modified_base 13: mod_base = OTHER; note = 2'O-methyl guanosine
  modified_base 14: mod_base = OTHER; note = 2'-fluoro guanosine
  modified_base 15: mod_base = OTHER; note = 2'O-methyl adenosine
  modified_base 16: mod_base = OTHER; note = 2'-fluoro cytidine
  modified_base 17: mod_base = OTHER; note = 2'O-methyl adenosine
  modified_base 18: mod_base = OTHER; note = 2'-fluoro uridine
  modified_base 19: mod_base = OTHER; note = 2'O-methyl uridine
  modified_base 20: mod_base = OTHER; note = 2'-fluoro guanosine
  modified_base 21: mod_base = OTHER; note = 2'O-methyl guanosine phosphorothioate
  modified_base 22: mod_base = OTHER; note = 2'O-methyl uridine phosphorothioate
  modified_base 23: mod_base = OTHER; note = 2'O-methyl uridine
agatgagctggtggacattggtt

SEQ ID NO: 1781 - RNA, 23 nt, synthetic construct
  source 1..23: mol_type = other RNA
  modified_base 1: mod_base = OTHER; note = 5' vinyl phosphonate 2'O-methyl guanosine phosphorothioate
  modified_base 2: mod_base = OTHER; note = 2'-fluoro adenosine phosphorothioate
  modified_base 3: mod_base = OTHER; note = 2'O-methyl guanosine
  modified_base 4: mod_base = OTHER; note = 2'-fluoro adenosine
  modified_base 5: mod_base = OTHER; note = 2'O-methyl uridine
  modified_base 6: mod_base = OTHER; note = 2'-fluoro guanosine
  modified_base 7: mod_base = OTHER; note = 2'O-methyl adenosine
  modified_base 8: mod_base = OTHER; note = 2'-fluoro guanosine
  modified_base 9: mod_base = OTHER; note = 2'O-methyl cytidine
  modified_base 10: mod_base = OTHER; note = 2'-fluoro uridine
  modified_base 11: mod_base = OTHER; note = 2'O-methyl guanosine
  modified_base 12: mod_base = OTHER; note = 2'-fluoro guanosine
  modified_base 13: mod_base = OTHER; note = 2'O-methyl uridine
  modified_base 14: mod_base = OTHER; note = 2'-fluoro guanosine
  modified_base 15: mod_base = OTHER; note = 2'O-methyl guanosine
  modified_base 16: mod_base = OTHER; note = 2'-fluoro adenosine
  modified_base 17: mod_base = OTHER; note = 2'O-methyl cytidine
  modified_base 18: mod_base = OTHER; note = 2'-fluoro adenosine
  modified_base 19: mod_base = OTHER; note = 2'O-methyl uridine
  modified_base 20: mod_base = OTHER; note = 2'-fluoro uridine
  modified_base 21: mod_base = OTHER; note = 2'O-methyl guanosine phosphorothioate
  modified_base 22: mod_base = OTHER; note = 2'O-methyl uridine phosphorothioate
  modified_base 23: mod_base = OTHER; note = 2'O-methyl uridine
gagatgagctggtggacattgtt

SEQ ID NO: 1782 - RNA, 23 nt, synthetic construct
  source 1..23: mol_type = other RNA
  modified_base 1: mod_base = OTHER; note = 5' vinyl phosphonate 2'O-methyl cytidine phosphorothioate
  modified_base 2: mod_base = OTHER; note = 2'-fluoro guanosine phosphorothioate
  modified_base 3: mod_base = OTHER; note = 2'O-methyl guanosine
  modified_base 4: mod_base = OTHER; note = 2'-fluoro adenosine
  modified_base 5: mod_base = OTHER; note = 2'O-methyl guanosine
  modified_base 6: mod_base = OTHER; note = 2'-fluoro adenosine
  modified_base 7: mod_base = OTHER; note = 2'O-methyl uridine
  modified_base 8: mod_base = OTHER; note = 2'-fluoro guanosine
  modified_base 9: mod_base = OTHER; note = 2'O-methyl adenosine
  modified_base 10: mod_base = OTHER; note = 2'-fluoro guanosine
  modified_base 11: mod_base = OTHER; note = 2'O-methyl cytidine
  modified_base 12: mod_base = OTHER; note = 2'-fluoro uridine
  modified_base 13: mod_base = OTHER; note = 2'O-methyl guanosine
  modified_base 14: mod_base = OTHER; note = 2'-fluoro guanosine
  modified_base 15: mod_base = OTHER; note = 2'O-methyl uridine
  modified_base 16: mod_base = OTHER; note = 2'-fluoro guanosine
  modified_base 17: mod_base = OTHER; note = 2'O-methyl guanosine
  modified_base 18: mod_base = OTHER; note = 2'-fluoro adenosine
  modified_base 19: mod_base = OTHER; note = 2'O-methyl cytidine
  modified_base 20: mod_base = OTHER; note = 2'-fluoro adenosine
  modified_base 21: mod_base = OTHER; note = 2'O-methyl uridine phosphorothioate
  modified_base 22: mod_base = OTHER; note = 2'O-methyl uridine phosphorothioate
  modified_base 23: mod_base = OTHER; note = 2'O-methyl uridine
cggagatgagctggtggacattt

SEQ ID NO: 1783 - RNA, 23 nt, synthetic construct
  source 1..23: mol_type = other RNA
  modified_base 1: mod_base = OTHER; note = 5' vinyl phosphonate 2'O-methyl cytidine phosphorothioate
  modified_base 2: mod_base = OTHER; note = 2'-fluoro cytidine phosphorothioate
  modified_base 3: mod_base = OTHER; note = 2'O-methyl guanosine
  modified_base 4: mod_base = OTHER; note = 2'-fluoro guanosine
  modified_base 5: mod_base = OTHER; note = 2'O-methyl adenosine
  modified_base 6: mod_base = OTHER; note = 2'-fluoro guanosine
  modified_base 7: mod_base = OTHER; note = 2'O-methyl adenosine
  modified_base 8: mod_base = OTHER; note = 2'-fluoro uridine
  modified_base 9: mod_base = OTHER; note = 2'O-methyl guanosine
  modified_base 10: mod_base = OTHER; note = 2'-fluoro adenosine
  modified_base 11: mod_base = OTHER; note = 2'O-methyl guanosine
  modified_base 12: mod_base = OTHER; note = 2'-fluoro cytidine
  modified_base 13: mod_base = OTHER; note = 2'O-methyl uridine
  modified_base 14: mod_base = OTHER; note = 2'-fluoro guanosine
  modified_base 15: mod_base = OTHER; note = 2'O-methyl guanosine
  modified_base 16: mod_base = OTHER; note = 2'-fluoro uridine
  modified_base 17: mod_base = OTHER; note = 2'O-methyl guanosine
  modified_base 18: mod_base = OTHER; note = 2'-fluoro guanosine
  modified_base 19: mod_base = OTHER; note = 2'O-methyl adenosine
  modified_base 20: mod_base = OTHER; note = 2'-fluoro cytidine
  modified_base 21: mod_base = OTHER; note = 2'O-methyl adenosine phosphorothioate
  modified_base 22: mod_base = OTHER; note = 2'O-methyl uridine phosphorothioate
  modified_base 23: mod_base = OTHER; note = 2'O-methyl uridine
ccggagatgagctggtggacatt

SEQ ID NO: 1784 - RNA, 23 nt, synthetic construct
  source 1..23: mol_type = other RNA
  modified_base 1: mod_base = OTHER; note = 5' vinyl phosphonate 2'O-methyl guanosine phosphorothioate
  modified_base 2: mod_base = OTHER; note = 2'-fluoro cytidine phosphorothioate
  modified_base 3: mod_base = OTHER; note = 2'O-methyl cytidine
  modified_base 4: mod_base = OTHER; note = 2'-fluoro guanosine
  modified_base 5: mod_base = OTHER; note = 2'O-methyl guanosine
  modified_base 6: mod_base = OTHER; note = 2'-fluoro adenosine
  modified_base 7: mod_base = OTHER; note = 2'O-methyl guanosine
  modified_base 8: mod_base = OTHER; note = 2'-fluoro adenosine
  modified_base 9: mod_base = OTHER; note = 2'O-methyl uridine
  modified_base 10: mod_base = OTHER; note = 2'-fluoro guanosine
  modified_base 11: mod_base = OTHER; note = 2'O-methyl adenosine
  modified_base 12: mod_base = OTHER; note = 2'-fluoro guanosine
  modified_base 13: mod_base = OTHER; note = 2'O-methyl cytidine
  modified_base 14: mod_base = OTHER; note = 2'-fluoro uridine
  modified_base 15: mod_base = OTHER; note = 2'O-methyl guanosine
  modified_base 16: mod_base = OTHER; note = 2'-fluoro guanosine
  modified_base 17: mod_base = OTHER; note = 2'O-methyl uridine
  modified_base 18: mod_base = OTHER; note = 2'-fluoro guanosine
  modified_base 19: mod_base = OTHER; note = 2'O-methyl guanosine
  modified_base 20: mod_base = OTHER; note = 2'-fluoro adenosine
  modified_base 21: mod_base = OTHER; note = 2'O-methyl cytidine phosphorothioate
  modified_base 22: mod_base = OTHER; note = 2'O-methyl uridine phosphorothioate
  modified_base 23: mod_base = OTHER; note = 2'O-methyl uridine
gccggagatgagctggtggactt

SEQ ID NO: 1785 - RNA, 23 nt, synthetic construct
  source 1..23: mol_type = other RNA
  modified_base 1: mod_base = OTHER; note = 5' vinyl phosphonate 2'O-methyl uridine phosphorothioate
  modified_base 2: mod_base = OTHER; note = 2'-fluoro guanosine phosphorothioate
  modified_base 3: mod_base = OTHER; note = 2'O-methyl cytidine
  modified_base 4: mod_base = OTHER; note = 2'-fluoro cytidine
  modified_base 5: mod_base = OTHER; note = 2'O-methyl guanosine
  modified_base 6: mod_base = OTHER; note = 2'-fluoro guanosine
  modified_base 7: mod_base = OTHER; note = 2'O-methyl adenosine
  modified_base 8: mod_base = OTHER; note = 2'-fluoro guanosine
  modified_base 9: mod_base = OTHER; note = 2'O-methyl adenosine
  modified_base 10: mod_base = OTHER; note = 2'-fluoro uridine
  modified_base 11: mod_base = OTHER; note = 2'O-methyl guanosine
  modified_base 12: mod_base = OTHER; note = 2'-fluoro adenosine
  modified_base 13: mod_base = OTHER; note = 2'O-methyl guanosine
  modified_base 14: mod_base = OTHER; note = 2'-fluoro cytidine
  modified_base 15: mod_base = OTHER; note = 2'O-methyl uridine
  modified_base 16: mod_base = OTHER; note = 2'-fluoro guanosine
  modified_base 17: mod_base = OTHER; note = 2'O-methyl guanosine
  modified_base 18: mod_base = OTHER; note = 2'-fluoro uridine
  modified_base 19: mod_base = OTHER; note = 2'O-methyl guanosine
  modified_base 20: mod_base = OTHER; note = 2'-fluoro guanosine
  modified_base 21: mod_base = OTHER; note = 2'O-methyl adenosine phosphorothioate
  modified_base 22: mod_base = OTHER; note = 2'O-methyl uridine phosphorothioate
  modified_base 23: mod_base = OTHER; note = 2'O-methyl uridine
tgccggagatgagctggtggatt

SEQ ID NO: 1786 - RNA, 23 nt, synthetic construct
  source 1..23: mol_type = other RNA
  modified_base 1: mod_base = OTHER; note = 5' vinyl phosphonate 2'O-methyl uridine phosphorothioate
  modified_base 2: mod_base = OTHER; note = 2'-fluoro uridine phosphorothioate
  modified_base 3: mod_base = OTHER; note = 2'O-methyl uridine
  modified_base 4: mod_base = OTHER; note = 2'-fluoro guanosine
  modified_base 5: mod_base = OTHER; note = 2'O-methyl cytidine
  modified_base 6: mod_base = OTHER; note = 2'-fluoro cytidine
  modified_base 7: mod_base = OTHER; note = 2'O-methyl guanosine
  modified_base 8: mod_base = OTHER; note = 2'-fluoro guanosine
  modified_base 9: mod_base = OTHER; note = 2'O-methyl adenosine
  modified_base 10: mod_base = OTHER; note = 2'-fluoro guanosine
  modified_base 11: mod_base = OTHER; note = 2'O-methyl adenosine
  modified_base 12: mod_base = OTHER; note = 2'-fluoro uridine
  modified_base 13: mod_base = OTHER; note = 2'O-methyl guanosine
  modified_base 14: mod_base = OTHER; note = 2'-fluoro adenosine
  modified_base 15: mod_base = OTHER; note = 2'O-methyl guanosine
  modified_base 16: mod_base = OTHER; note = 2'-fluoro cytidine
  modified_base 17: mod_base = OTHER; note = 2'O-methyl uridine
  modified_base 18: mod_base = OTHER; note = 2'-fluoro guanosine
  modified_base 19: mod_base = OTHER; note = 2'O-methyl guanosine
  modified_base 20: mod_base = OTHER; note = 2'-fluoro uridine
  modified_base 21: mod_base = OTHER; note = 2'O-methyl guanosine phosphorothioate
  modified_base 22: mod_base = OTHER; note = 2'O-methyl uridine phosphorothioate
  modified_base 23: mod_base = OTHER; note = 2'O-methyl uridine
tttgccggagatgagctggtgtt

SEQ ID NO: 1787 - RNA, 23 nt, synthetic construct
  source 1..23: mol_type = other RNA
  modified_base 1: mod_base = OTHER; note = 5' vinyl phosphonate 2'O-methyl cytidine phosphorothioate
  modified_base 2: mod_base = OTHER; note = 2'-fluoro cytidine phosphorothioate
  modified_base 3: mod_base = OTHER; note = 2'O-methyl adenosine
  modified_base 4: mod_base = OTHER; note = 2'-fluoro uridine
  modified_base 5: mod_base = OTHER; note = 2'O-methyl cytidine
  modified_base 6: mod_base = OTHER; note = 2'-fluoro adenosine
  modified_base 7: mod_base = OTHER; note = 2'O-methyl guanosine
  modified_base 8: mod_base = OTHER; note = 2'-fluoro adenosine
  modified_base 9: mod_base = OTHER; note = 2'O-methyl cytidine
  modified_base 10: mod_base = OTHER; note = 2'-fluoro adenosine
  modified_base 11: mod_base = OTHER; note = 2'O-methyl cytidine
  modified_base 12: mod_base = OTHER; note = 2'-fluoro uridine
  modified_base 13: mod_base = OTHER; note = 2'O-methyl cytidine
  modified_base 14: mod_base = OTHER; note = 2'-fluoro uridine
  modified_base 15: mod_base = OTHER; note = 2'O-methyl guanosine
  modified_base 16: mod_base = OTHER; note = 2'-fluoro guanosine
  modified_base 17: mod_base = OTHER; note = 2'O-methyl uridine
  modified_base 18: mod_base = OTHER; note = 2'-fluoro adenosine
  modified_base 19: mod_base = OTHER; note = 2'O-methyl adenosine
  modified_base 20: mod_base = OTHER; note = 2'-fluoro guanosine
  modified_base 21: mod_base = OTHER; note = 2'O-methyl adenosine phosphorothioate
  modified_base 22: mod_base = OTHER; note = 2'O-methyl uridine phosphorothioate
  modified_base 23: mod_base = OTHER; note = 2'O-methyl uridine
ccatcagacactctggtaagatt

SEQ ID NO: 1788 - RNA, 23 nt, synthetic construct
  source 1..23: mol_type = other RNA
  modified_base 1: mod_base = OTHER; note = 5' vinyl phosphonate 2'O-methyl cytidine phosphorothioate
  modified_base 2: mod_base = OTHER; note = 2'-fluoro cytidine phosphorothioate
  modified_base 3: mod_base = OTHER; note = 2'O-methyl cytidine
  modified_base 4: mod_base = OTHER; note = 2'-fluoro adenosine
  modified_base 5: mod_base = OTHER; note = 2'O-methyl uridine
  modified_base 6: mod_base = OTHER; note = 2'-fluoro cytidine
  modified_base 7: mod_base = OTHER; note = 2'O-methyl adenosine
  modified_base 8: mod_base = OTHER; note = 2'-fluoro guanosine
  modified_base 9: mod_base = OTHER; note = 2'O-methyl adenosine
  modified_base 10: mod_base = OTHER; note = 2'-fluoro cytidine
  modified_base 11: mod_base = OTHER; note = 2'O-methyl adenosine
  modified_base 12: mod_base = OTHER; note = 2'-fluoro cytidine
  modified_base 13: mod_base = OTHER; note = 2'O-methyl uridine
  modified_base 14: mod_base = OTHER; note = 2'-fluoro cytidine
  modified_base 15: mod_base = OTHER; note = 2'O-methyl uridine
  modified_base 16: mod_base = OTHER; note = 2'-fluoro guanosine
  modified_base 17: mod_base = OTHER; note = 2'O-methyl guanosine
  modified_base 18: mod_base = OTHER; note = 2'-fluoro uridine
  modified_base 19: mod_base = OTHER; note = 2'O-methyl adenosine
  modified_base 20: mod_base = OTHER; note = 2'-fluoro adenosine
  modified_base 21: mod_base = OTHER; note = 2'O-methyl guanosine phosphorothioate
  modified_base 22: mod_base = OTHER; note = 2'O-methyl uridine phosphorothioate
  modified_base 23: mod_base = OTHER; note = 2'O-methyl uridine
cccatcagacactctggtaagtt

SEQ ID NO: 1789 - RNA, 23 nt, synthetic construct
  source 1..23: mol_type = other RNA
  modified_base 1: mod_base = OTHER; note = 5' vinyl phosphonate 2'O-methyl cytidine phosphorothioate
  modified_base 2: mod_base = OTHER; note = 2'-fluoro cytidine phosphorothioate
  modified_base 3: mod_base = OTHER; note = 2'O-methyl cytidine
  modified_base 4: mod_base = OTHER; note = 2'-fluoro cytidine
  modified_base 5: mod_base = OTHER; note = 2'O-methyl adenosine
  modified_base 6: mod_base = OTHER; note = 2'-fluoro uridine
  modified_base 7: mod_base = OTHER; note = 2'O-methyl cytidine
  modified_base 8: mod_base = OTHER; note = 2'-fluoro adenosine
  modified_base 9: mod_base = OTHER; note = 2'O-methyl guanosine
  modified_base 10: mod_base = OTHER; note = 2'-fluoro adenosine
  modified_base 11: mod_base = OTHER; note = 2'O-methyl cytidine
  modified_base 12: mod_base = OTHER; note = 2'-fluoro adenosine
  modified_base 13: mod_base = OTHER; note = 2'O-methyl cytidine
  modified_base 14: mod_base = OTHER; note = 2'-fluoro uridine
  modified_base 15: mod_base = OTHER; note = 2'O-methyl cytidine
  modified_base 16: mod_base = OTHER; note = 2'-fluoro uridine
  modified_base 17: mod_base = OTHER; note = 2'O-methyl guanosine
  modified_base 18: mod_base = OTHER; note = 2'-fluoro guanosine
  modified_base 19: mod_base = OTHER; note = 2'O-methyl uridine
  modified_base 20: mod_base = OTHER; note = 2'-fluoro adenosine
  modified_base 21: mod_base = OTHER; note = 2'O-methyl adenosine phosphorothioate
  modified_base 22: mod_base = OTHER; note = 2'O-methyl uridine phosphorothioate
  modified_base 23: mod_base = OTHER; note = 2'O-methyl uridine
ccccatcagacactctggtaatt

SEQ ID NO: 1790 - RNA, 23 nt, synthetic construct
  source 1..23: mol_type = other RNA
  modified_base 1: mod_base = OTHER; note = 5' vinyl phosphonate 2'O-methyl uridine phosphorothioate
  modified_base 2: mod_base = OTHER; note = 2'-fluoro cytidine phosphorothioate
  modified_base 3: mod_base = OTHER; note = 2'O-methyl cytidine
  modified_base 4: mod_base = OTHER; note = 2'-fluoro cytidine
  modified_base 5: mod_base = OTHER; note = 2'O-methyl cytidine
  modified_base 6: mod_base = OTHER; note = 2'-fluoro adenosine
  modified_base 7: mod_base = OTHER; note = 2'O-methyl uridine
  modified_base 8: mod_base = OTHER; note = 2'-fluoro cytidine
  modified_base 9: mod_base = OTHER; note = 2'O-methyl adenosine
  modified_base 10: mod_base = OTHER; note = 2'-fluoro guanosine
  modified_base 11: mod_base = OTHER; note = 2'O-methyl adenosine
  modified_base 12: mod_base = OTHER; note = 2'-fluoro cytidine
  modified_base 13: mod_base = OTHER; note = 2'O-methyl adenosine
  modified_base 14: mod_base = OTHER; note = 2'-fluoro cytidine
  modified_base 15: mod_base = OTHER; note = 2'O-methyl uridine
  modified_base 16: mod_base = OTHER; note = 2'-fluoro cytidine
  modified_base 17: mod_base = OTHER; note = 2'O-methyl uridine
  modified_base 18: mod_base = OTHER; note = 2'-fluoro guanosine
  modified_base 19: mod_base = OTHER; note = 2'O-methyl guanosine
  modified_base 20: mod_base = OTHER; note = 2'-fluoro uridine
  modified_base 21: mod_base = OTHER; note = 2'O-methyl adenosine phosphorothioate
  modified_base 22: mod_base = OTHER; note = 2'O-methyl uridine phosphorothioate
  modified_base 23: mod_base = OTHER; note = 2'O-methyl uridine
tccccatcagacactctggtatt

SEQ ID NO: 1791 - RNA, 23 nt, synthetic construct
  source 1..23: mol_type = other RNA
  modified_base 1: mod_base = OTHER; note = 5' vinyl phosphonate 2'O-methyl uridine phosphorothioate
  modified_base 2: mod_base = OTHER; note = 2'-fluoro uridine phosphorothioate
  modified_base 3: mod_base = OTHER; note = 2'O-methyl uridine
  modified_base 4: mod_base = OTHER; note = 2'-fluoro uridine
  modified_base 5: mod_base = OTHER; note = 2'O-methyl cytidine
  modified_base 6: mod_base = OTHER; note = 2'-fluoro cytidine
  modified_base 7: mod_base = OTHER; note = 2'O-methyl cytidine
  modified_base 8: mod_base = OTHER; note = 2'-fluoro cytidine
  modified_base 9: mod_base = OTHER; note = 2'O-methyl adenosine
  modified_base 10: mod_base = OTHER; note = 2'-fluoro uridine
  modified_base 11: mod_base = OTHER; note = 2'O-methyl cytidine
  modified_base 12: mod_base = OTHER; note = 2'-fluoro adenosine
  modified_base 13: mod_base = OTHER; note = 2'O-methyl guanosine
  modified_base 14: mod_base = OTHER; note = 2'-fluoro adenosine
  modified_base 15: mod_base = OTHER; note = 2'O-methyl cytidine
  modified_base 16: mod_base = OTHER; note = 2'-fluoro adenosine
  modified_base 17: mod_base = OTHER; note = 2'O-methyl cytidine
  modified_base 18: mod_base = OTHER; note = 2'-fluoro uridine
  modified_base 19: mod_base = OTHER; note = 2'O-methyl cytidine
  modified_base 20: mod_base = OTHER; note = 2'-fluoro uridine
  modified_base 21: mod_base = OTHER; note = 2'O-methyl guanosine phosphorothioate
  modified_base 22: mod_base = OTHER; note = 2'O-methyl uridine phosphorothioate
  modified_base 23: mod_base = OTHER; note = 2'O-methyl uridine
ttttccccatcagacactctgtt

SEQ ID NO: 1792 - RNA, 23 nt, synthetic construct
  source 1..23: mol_type = other RNA
  modified_base 1: mod_base = OTHER; note = 5' vinyl phosphonate 2'O-methyl guanosine phosphorothioate
  modified_base 2: mod_base = OTHER; note = 2'-fluoro uridine phosphorothioate
  modified_base 3: mod_base = OTHER; note = 2'O-methyl uridine
  modified_base 4: mod_base = OTHER; note = 2'-fluoro uridine
  modified_base 5: mod_base = OTHER; note = 2'O-methyl uridine
  modified_base 6: mod_base = OTHER; note = 2'-fluoro cytidine
  modified_base 7: mod_base = OTHER; note = 2'O-methyl cytidine
  modified_base 8: mod_base = OTHER; note = 2'-fluoro cytidine
  modified_base 9: mod_base = OTHER; note = 2'O-methyl cytidine
  modified_base 10: mod_base = OTHER; note = 2'-fluoro adenosine
  modified_base 11: mod_base = OTHER; note = 2'O-methyl uridine
  modified_base 12: mod_base = OTHER; note = 2'-fluoro cytidine
  modified_base 13: mod_base = OTHER; note = 2'O-methyl adenosine
  modified_base 14: mod_base = OTHER; note = 2'-fluoro guanosine
  modified_base 15: mod_base = OTHER; note = 2'O-methyl adenosine
  modified_base 16: mod_base = OTHER; note = 2'-fluoro cytidine
  modified_base 17: mod_base = OTHER; note = 2'O-methyl adenosine
  modified_base 18: mod_base = OTHER; note = 2'-fluoro cytidine
  modified_base 19: mod_base = OTHER; note = 2'O-methyl uridine
  modified_base 20: mod_base = OTHER; note = 2'-fluoro cytidine
  modified_base 21: mod_base = OTHER; note = 2'O-methyl uridine phosphorothioate
  modified_base 22: mod_base = OTHER; note = 2'O-methyl uridine phosphorothioate
  modified_base 23: mod_base = OTHER; note = 2'O-methyl uridine
gttttccccatcagacactcttt

SEQ ID NO: 1793 - RNA, 23 nt, synthetic construct
  source 1..23: mol_type = other RNA
  modified_base 1: mod_base = OTHER; note = 5' vinyl phosphonate 2'O-methyl cytidine phosphorothioate
  modified_base 2: mod_base = OTHER; note = 2'-fluoro guanosine phosphorothioate
  modified_base 3: mod_base = OTHER; note = 2'O-methyl uridine
  modified_base 4: mod_base = OTHER; note = 2'-fluoro uridine
  modified_base 5: mod_base = OTHER; note = 2'O-methyl uridine
  modified_base 6: mod_base = OTHER; note = 2'-fluoro uridine
  modified_base 7: mod_base = OTHER; note = 2'O-methyl cytidine
  modified_base 8: mod_base = OTHER; note = 2'-fluoro cytidine
  modified_base 9: mod_base = OTHER; note = 2'O-methyl cytidine
  modified_base 10: mod_base = OTHER; note = 2'-fluoro cytidine
  modified_base 11: mod_base = OTHER; note = 2'O-methyl adenosine
  modified_base 12: mod_base = OTHER; note = 2'-fluoro uridine
  modified_base 13: mod_base = OTHER; note = 2'O-methyl cytidine
  modified_base 14: mod_base = OTHER; note = 2'-fluoro adenosine
  modified_base 15: mod_base = OTHER; note = 2'O-methyl guanosine
  modified_base 16: mod_base = OTHER; note = 2'-fluoro adenosine
  modified_base 17: mod_base = OTHER; note = 2'O-methyl cytidine
  modified_base 18: mod_base = OTHER; note = 2'-fluoro adenosine
  modified_base 19: mod_base = OTHER; note = 2'O-methyl cytidine
  modified_base 20: mod_base = OTHER; note = 2'-fluoro uridine
  modified_base 21: mod_base = OTHER; note = 2'O-methyl cytidine phosphorothioate
  modified_base 22: mod_base = OTHER; note = 2'O-methyl uridine phosphorothioate
  modified_base 23: mod_base = OTHER; note = 2'O-methyl uridine
cgttttccccatcagacactctt

SEQ ID NO: 1794 - RNA, 23 nt, synthetic construct
  source 1..23: mol_type = other RNA
  modified_base 1: mod_base = OTHER; note = 5' vinyl phosphonate 2'O-methyl adenosine phosphorothioate
  modified_base 2: mod_base = OTHER; note = 2'-fluoro cytidine phosphorothioate
  modified_base 3: mod_base = OTHER; note = 2'O-methyl guanosine
  modified_base 4: mod_base = OTHER; note = 2'-fluoro uridine
  modified_base 5: mod_base = OTHER; note = 2'O-methyl uridine
  modified_base 6: mod_base = OTHER; note = 2'-fluoro uridine
  modified_base 7: mod_base = OTHER; note = 2'O-methyl uridine
  modified_base 8: mod_base = OTHER; note = 2'-fluoro cytidine
  modified_base 9: mod_base = OTHER; note = 2'O-methyl cytidine
  modified_base 10: mod_base = OTHER; note = 2'-fluoro cytidine
  modified_base 11: mod_base = OTHER; note = 2'O-methyl cytidine
  modified_base 12: mod_base = OTHER; note = 2'-fluoro adenosine
  modified_base 13: mod_base = OTHER; note = 2'O-methyl uridine
  modified_base 14: mod_base = OTHER; note = 2'-fluoro cytidine
  modified_base 15: mod_base = OTHER; note = 2'O-methyl adenosine
  modified_base 16: mod_base = OTHER; note = 2'-fluoro guanosine
  modified_base 17: mod_base = OTHER; note = 2'O-methyl adenosine
  modified_base 18: mod_base = OTHER; note = 2'-fluoro cytidine
  modified_base 19: mod_base = OTHER; note = 2'O-methyl adenosine
  modified_base 20: mod_base = OTHER; note = 2'-fluoro cytidine
  modified_base 21: mod_base = OTHER; note = 2'O-methyl uridine phosphorothioate
  modified_base 22: mod_base = OTHER; note = 2'O-methyl uridine phosphorothioate
  modified_base 23: mod_base = OTHER; note = 2'O-methyl uridine
acgttttccccatcagacacttt

SEQ ID NO: 1795 - RNA, 23 nt, synthetic construct
  source 1..23: mol_type = other RNA
  modified_base 1: mod_base = OTHER; note = 5' vinyl phosphonate 2'O-methyl adenosine phosphorothioate
  modified_base 2: mod_base = OTHER; note = 2'-fluoro adenosine phosphorothioate
  modified_base 3: mod_base = OTHER; note = 2'O-methyl cytidine
  modified_base 4: mod_base = OTHER; note = 2'-fluoro guanosine
  modified_base 5: mod_base = OTHER; note = 2'O-methyl uridine
  modified_base 6: mod_base = OTHER; note = 2'-fluoro uridine
  modified_base 7: mod_base = OTHER; note = 2'O-methyl uridine
  modified_base 8: mod_base = OTHER; note = 2'-fluoro uridine
  modified_base 9: mod_base = OTHER; note = 2'O-methyl cytidine
  modified_base 10: mod_base = OTHER; note = 2'-fluoro cytidine
  modified_base 11: mod_base = OTHER; note = 2'O-methyl cytidine
  modified_base 12: mod_base = OTHER; note = 2'-fluoro cytidine
  modified_base 13: mod_base = OTHER; note = 2'O-methyl adenosine
  modified_base 14: mod_base = OTHER; note = 2'-fluoro uridine
  modified_base 15: mod_base = OTHER; note = 2'O-methyl cytidine
  modified_base 16: mod_base = OTHER; note = 2'-fluoro adenosine
  modified_base 17: mod_base = OTHER; note = 2'O-methyl guanosine
  modified_base 18: mod_base = OTHER; note = 2'-fluoro adenosine
  modified_base 19: mod_base = OTHER; note = 2'O-methyl cytidine
  modified_base 20: mod_base = OTHER; note = 2'-fluoro adenosine
  modified_base 21: mod_base = OTHER; note = 2'O-methyl cytidine phosphorothioate
  modified_base 22: mod_base = OTHER; note = 2'O-methyl uridine phosphorothioate
  modified_base 23: mod_base = OTHER; note = 2'O-methyl uridine
aacgttttccccatcagacactt

SEQ ID NO: 1796 - RNA, 23 nt, synthetic construct
  source 1..23: mol_type = other RNA
  modified_base 1: mod_base = OTHER; note = 5' vinyl phosphonate 2'O-methyl guanosine phosphorothioate
  modified_base 2: mod_base = OTHER; note = 2'-fluoro adenosine phosphorothioate
  modified_base 3: mod_base = OTHER; note = 2'O-methyl adenosine
  modified_base 4: mod_base = OTHER; note = 2'-fluoro cytidine
  modified_base 5: mod_base = OTHER; note = 2'O-methyl guanosine
  modified_base 6: mod_base = OTHER; note = 2'-fluoro uridine
  modified_base 7: mod_base = OTHER; note = 2'O-methyl uridine
  modified_base 8: mod_base = OTHER; note = 2'-fluoro uridine
  modified_base 9: mod_base = OTHER; note = 2'O-methyl uridine
  modified_base 10: mod_base = OTHER; note = 2'-fluoro cytidine
  modified_base 11: mod_base = OTHER; note = 2'O-methyl cytidine
  modified_base 12: mod_base = OTHER; note = 2'-fluoro cytidine
  modified_base 13: mod_base = OTHER; note = 2'O-methyl cytidine
  modified_base 14: mod_base = OTHER; note = 2'-fluoro adenosine
  modified_base 15: mod_base = OTHER; note = 2'O-methyl uridine
  modified_base 16: mod_base = OTHER; note = 2'-fluoro cytidine
  modified_base 17: mod_base = OTHER; note = 2'O-methyl adenosine
  modified_base 18: mod_base = OTHER; note = 2'-fluoro guanosine
  modified_base 19: mod_base = OTHER; note = 2'O-methyl adenosine
  modified_base 20: mod_base = OTHER; note = 2'-fluoro cytidine
  modified_base 21: mod_base = OTHER; note = 2'O-methyl adenosine phosphorothioate
  modified_base 22: mod_base = OTHER; note = 2'O-methyl uridine phosphorothioate
  modified_base 23: mod_base = OTHER; note = 2'O-methyl uridine
gaacgttttccccatcagacatt

SEQ ID NO: 1797 - RNA, 23 nt, synthetic construct
  source 1..23: mol_type = other RNA
  modified_base 1: mod_base = OTHER; note = 5' vinyl phosphonate 2'O-methyl adenosine phosphorothioate
  modified_base 2: mod_base = OTHER; note = 2'-fluoro guanosine phosphorothioate
  modified_base 3: mod_base = OTHER; note = 2'O-methyl adenosine
  modified_base 4: mod_base = OTHER; note = 2'-fluoro adenosine
  modified_base 5: mod_base = OTHER; note = 2'O-methyl cytidine
  modified_base 6: mod_base = OTHER; note = 2'-fluoro guanosine
  modified_base 7: mod_base = OTHER; note = 2'O-methyl uridine
  modified_base 8: mod_base = OTHER; note = 2'-fluoro uridine
  modified_base 9: mod_base = OTHER; note = 2'O-methyl uridine
  modified_base 10: mod_base = OTHER; note = 2'-fluoro uridine
  modified_base 11: mod_base = OTHER; note = 2'O-methyl cytidine
  modified_base 12: mod_base = OTHER; note = 2'-fluoro cytidine
  modified_base 13: mod_base = OTHER; note = 2'O-methyl cytidine
  modified_base 14: mod_base = OTHER; note = 2'-fluoro cytidine
  modified_base 15: mod_base = OTHER; note = 2'O-methyl adenosine
  modified_base 16: mod_base = OTHER; note = 2'-fluoro uridine
  modified_base 17: mod_base = OTHER; note = 2'O-methyl cytidine
  modified_base 18: mod_base = OTHER; note = 2'-fluoro adenosine
  modified_base 19: mod_base = OTHER; note = 2'O-methyl guanosine
  modified_base 20: mod_base = OTHER; note = 2'-fluoro adenosine
  modified_base 21: mod_base = OTHER; note = 2'O-methyl cytidine phosphorothioate
  modified_base 22: mod_base = OTHER; note = 2'O-methyl uridine phosphorothioate
  modified_base 23: mod_base = OTHER; note = 2'O-methyl uridine
agaacgttttccccatcagactt

SEQ ID NO: 1798 - RNA, 23 nt, synthetic construct
  source 1..23: mol_type = other RNA
  modified_base 1: mod_base = OTHER; note = 5' vinyl phosphonate 2'O-methyl cytidine phosphorothioate
  modified_base 2: mod_base = OTHER; note = 2'-fluoro adenosine phosphorothioate
  modified_base 3: mod_base = OTHER; note = 2'O-methyl guanosine
  modified_base 4: mod_base = OTHER; note = 2'-fluoro adenosine
  modified_base 5: mod_base = OTHER; note = 2'O-methyl adenosine
  modified_base 6: mod_base = OTHER; note = 2'-fluoro cytidine
  modified_base 7: mod_base = OTHER; note = 2'O-methyl guanosine
  modified_base 8: mod_base = OTHER; note = 2'-fluoro uridine
  modified_base 9: mod_base = OTHER; note = 2'O-methyl uridine
  modified_base 10: mod_base = OTHER; note = 2'-fluoro uridine
  modified_base 11: mod_base = OTHER; note = 2'O-methyl uridine
  modified_base 12: mod_base = OTHER; note = 2'-fluoro cytidine
  modified_base 13: mod_base = OTHER; note = 2'O-methyl cytidine
  modified_base 14: mod_base = OTHER; note = 2'-fluoro cytidine
  modified_base 15: mod_base = OTHER; note = 2'O-methyl cytidine
  modified_base 16: mod_base = OTHER; note = 2'-fluoro adenosine
  modified_base 17: mod_base = OTHER; note = 2'O-methyl uridine
  modified_base 18: mod_base = OTHER; note = 2'-fluoro cytidine
  modified_base 19: mod_base = OTHER; note = 2'O-methyl adenosine
  modified_base 20: mod_base = OTHER; note = 2'-fluoro guanosine
  modified_base 21: mod_base = OTHER; note = 2'O-methyl adenosine phosphorothioate
  modified_base 22: mod_base = OTHER; note = 2'O-methyl uridine phosphorothioate
  modified_base 23: mod_base = OTHER; note = 2'O-methyl uridine
cagaacgttttccccatcagatt

SEQ ID NO: 1799 - RNA, 23 nt, synthetic construct
  source 1..23: mol_type = other RNA
  modified_base 1: mod_base = OTHER; note = 5' vinyl phosphonate 2'O-methyl cytidine phosphorothioate
  modified_base 2: mod_base = OTHER; note = 2'-fluoro cytidine phosphorothioate
  modified_base 3: mod_base = OTHER; note = 2'O-methyl adenosine
  modified_base 4: mod_base = OTHER; note = 2'-fluoro guanosine
  modified_base 5: mod_base = OTHER; note = 2'O-methyl adenosine
  modified_base 6: mod_base = OTHER; note = 2'-fluoro adenosine
  modified_base 7: mod_base = OTHER; note = 2'O-methyl cytidine
  modified_base 8: mod_base = OTHER; note = 2'-fluoro guanosine
  modified_base 9: mod_base = OTHER; note = 2'O-methyl uridine
  modified_base 10: mod_base = OTHER; note = 2'-fluoro uridine
  modified_base 11: mod_base = OTHER; note = 2'O-methyl uridine
  modified_base 12: mod_base = OTHER; note = 2'-fluoro uridine
  modified_base 13: mod_base = OTHER; note = 2'O-methyl cytidine
  modified_base 14: mod_base = OTHER; note = 2'-fluoro cytidine
  modified_base 15: mod_base = OTHER; note = 2'O-methyl cytidine
  modified_base 16: mod_base = OTHER; note = 2'-fluoro cytidine
  modified_base 17: mod_base = OTHER; note = 2'O-methyl adenosine
  modified_base 18: mod_base = OTHER; note = 2'-fluoro uridine
  modified_base 19: mod_base = OTHER; note = 2'O-methyl cytidine
  modified_base 20: mod_base = OTHER; note = 2'-fluoro adenosine
  modified_base 21: mod_base = OTHER; note = 2'O-methyl guanosine phosphorothioate
  modified_base 22: mod_base = OTHER; note = 2'O-methyl uridine phosphorothioate
  modified_base 23: mod_base = OTHER; note = 2'O-methyl uridine
ccagaacgttttccccatcagtt

SEQ ID NO: 1800 - RNA, 23 nt, synthetic construct
  source 1..23: mol_type = other RNA
  modified_base 1: mod_base = OTHER; note = 5' vinyl phosphonate 2'O-methyl adenosine phosphorothioate
  modified_base 2: mod_base = OTHER; note = 2'-fluoro cytidine phosphorothioate
  modified_base 3: mod_base = OTHER; note = 2'O-methyl cytidine
  modified_base 4: mod_base = OTHER; note = 2'-fluoro adenosine
  modified_base 5: mod_base = OTHER; note = 2'O-methyl guanosine
  modified_base 6: mod_base = OTHER; note = 2'-fluoro adenosine
  modified_base 7: mod_base = OTHER; note = 2'O-methyl adenosine
  modified_base 8: mod_base = OTHER; note = 2'-fluoro cytidine
  modified_base 9: mod_base = OTHER; note = 2'O-methyl guanosine
  modified_base 10: mod_base = OTHER; note = 2'-fluoro uridine
  modified_base 11: mod_base = OTHER; note = 2'O-methyl uridine
  modified_base 12: mod_base = OTHER; note = 2'-fluoro uridine
  modified_base 13: mod_base = OTHER; note = 2'O-methyl uridine
  modified_base 14: mod_base = OTHER; note = 2'-fluoro cytidine
  modified_base 15: mod_base = OTHER; note = 2'O-methyl cytidine
  modified_base 16: mod_base = OTHER; note = 2'-fluoro cytidine
  modified_base 17: mod_base = OTHER; note = 2'O-methyl cytidine
  modified_base 18: mod_base = OTHER; note = 2'-fluoro adenosine
  modified_base 19: mod_base = OTHER; note = 2'O-methyl uridine
  modified_base 20: mod_base = OTHER; note = 2'-fluoro cytidine
  modified_base 21: mod_base = OTHER; note = 2'O-methyl adenosine phosphorothioate
  modified_base 22: mod_base = OTHER; note = 2'O-methyl uridine phosphorothioate
  modified_base 23: mod_base = OTHER; note = 2'O-methyl uridine
accagaacgttttccccatcatt

SEQ ID NO: 1801 - RNA, 23 nt, synthetic construct
  source 1..23: mol_type = other RNA
  modified_base 1: mod_base = OTHER; note = 5' vinyl phosphonate 2'O-methyl cytidine phosphorothioate
  modified_base 2: mod_base = OTHER; note = 2'-fluoro adenosine phosphorothioate
  modified_base 3: mod_base = OTHER; note = 2'O-methyl cytidine
  modified_base 4: mod_base = OTHER; note = 2'-fluoro cytidine
  modified_base 5: mod_base = OTHER; note = 2'O-methyl adenosine
  modified_base 6: mod_base = OTHER; note = 2'-fluoro guanosine
  modified_base 7: mod_base = OTHER; note = 2'O-methyl adenosine
  modified_base 8: mod_base = OTHER; note = 2'-fluoro adenosine
  modified_base 9: mod_base = OTHER; note = 2'O-methyl cytidine
  modified_base 10: mod_base = OTHER; note = 2'-fluoro guanosine
  modified_base 11: mod_base = OTHER; note = 2'O-methyl uridine
  modified_base 12: mod_base = OTHER; note = 2'-fluoro uridine
  modified_base 13: mod_base = OTHER; note = 2'O-methyl uridine
  modified_base 14: mod_base = OTHER; note = 2'-fluoro uridine
  modified_base 15: mod_base = OTHER; note = 2'O-methyl cytidine
  modified_base 16: mod_base = OTHER; note = 2'-fluoro cytidine
  modified_base 17: mod_base = OTHER; note = 2'O-methyl cytidine
  modified_base 18: mod_base = OTHER; note = 2'-fluoro cytidine
  modified_base 19: mod_base = OTHER; note = 2'O-methyl adenosine
  modified_base 20: mod_base = OTHER; note = 2'-fluoro uridine
  modified_base 21: mod_base = OTHER; note = 2'O-methyl cytidine phosphorothioate
  modified_base 22: mod_base = OTHER; note = 2'O-methyl uridine phosphorothioate
  modified_base 23: mod_base = OTHER; note = 2'O-methyl uridine
caccagaacgttttccccatctt

SEQ ID NO: 1802 - RNA, 23 nt, synthetic construct
  source 1..23: mol_type = other RNA
  modified_base 1: mod_base = OTHER; note = 5' vinyl phosphonate 2'O-methyl guanosine phosphorothioate
  modified_base 2: mod_base = OTHER; note = 2'-fluoro adenosine phosphorothioate
  modified_base 3: mod_base = OTHER; note = 2'O-methyl cytidine
  modified_base 4: mod_base = OTHER; note = 2'-fluoro adenosine
  modified_base 5: mod_base = OTHER; note = 2'O-methyl cytidine
  modified_base 6: mod_base = OTHER; note = 2'-fluoro cytidine
  modified_base 7: mod_base = OTHER; note = 2'O-methyl adenosine
  modified_base 8: mod_base = OTHER; note = 2'-fluoro guanosine
  modified_base 9: mod_base = OTHER; note = 2'O-methyl adenosine
  modified_base 10: mod_base = OTHER; note = 2'-fluoro adenosine
  modified_base 11: mod_base = OTHER; note = 2'O-methyl cytidine
  modified_base 12: mod_base = OTHER; note = 2'-fluoro guanosine
  modified_base 13: mod_base = OTHER; note = 2'O-methyl uridine
  modified_base 14: mod_base = OTHER; note = 2'-fluoro uridine
  modified_base 15: mod_base = OTHER; note = 2'O-methyl uridine
  modified_base 16: mod_base = OTHER; note = 2'-fluoro uridine
  modified_base 17: mod_base = OTHER; note = 2'O-methyl cytidine
  modified_base 18: mod_base = OTHER; note = 2'-fluoro cytidine
  modified_base 19: mod_base = OTHER; note = 2'O-methyl cytidine
  modified_base 20: mod_base = OTHER; note = 2'-fluoro cytidine
  modified_base 21: mod_base = OTHER; note = 2'O-methyl adenosine phosphorothioate
  modified_base 22: mod_base = OTHER; note = 2'O-methyl uridine phosphorothioate
  modified_base 23: mod_base = OTHER; note = 2'O-methyl uridine
gacaccagaacgttttccccatt

SEQ ID NO: 1803 - RNA, 23 nt, synthetic construct
  source 1..23: mol_type = other RNA
  modified_base 1: mod_base = OTHER; note = 5' vinyl phosphonate 2'O-methyl cytidine phosphorothioate
  modified_base 2: mod_base = OTHER; note = 2'-fluoro adenosine phosphorothioate
  modified_base 3: mod_base = OTHER; note = 2'O-methyl guanosine
  modified_base 4: mod_base = OTHER; note = 2'-fluoro adenosine
  modified_base 5: mod_base = OTHER; note = 2'O-methyl cytidine
  modified_base 6: mod_base = OTHER; note = 2'-fluoro adenosine
  modified_base 7: mod_base = OTHER; note = 2'O-methyl cytidine
  modified_base 8: mod_base = OTHER; note = 2'-fluoro cytidine
  modified_base 9: mod_base = OTHER; note = 2'O-methyl adenosine
  modified_base 10: mod_base = OTHER; note = 2'-fluoro guanosine
  modified_base 11: mod_base = OTHER; note = 2'O-methyl adenosine
  modified_base 12: mod_base = OTHER; note = 2'-fluoro adenosine
  modified_base 13: mod_base = OTHER; note = 2'O-methyl cytidine
  modified_base 14: mod_base = OTHER; note = 2'-fluoro guanosine
  modified_base 15: mod_base = OTHER; note = 2'O-methyl uridine
  modified_base 16: mod_base = OTHER; note = 2'-fluoro uridine
  modified_base 17: mod_base = OTHER; note = 2'O-methyl uridine
  modified_base 18: mod_base = OTHER; note = 2'-fluoro uridine
  modified_base 19: mod_base = OTHER; note = 2'O-methyl cytidine
  modified_base 20: mod_base = OTHER; note = 2'-fluoro cytidine
  modified_base 21: mod_base = OTHER; note = 2'O-methyl cytidine phosphorothioate
  modified_base 22: mod_base = OTHER; note = 2'O-methyl uridine phosphorothioate
  modified_base 23: mod_base = OTHER; note = 2'O-methyl uridine
cagacaccagaacgttttccctt

SEQ ID NO: 1804 - RNA, 23 nt, synthetic construct
  source 1..23: mol_type = other RNA
  modified_base 1: mod_base = OTHER; note = 5' vinyl phosphonate 2'O-methyl uridine phosphorothioate
  modified_base 2: mod_base = OTHER; note = 2'-fluoro cytidine phosphorothioate
  modified_base 3: mod_base = OTHER; note = 2'O-methyl adenosine
  modified_base 4: mod_base = OTHER; note = 2'-fluoro guanosine
  modified_base 5: mod_base = OTHER; note = 2'O-methyl adenosine
  modified_base 6: mod_base = OTHER; note = 2'-fluoro cytidine
  modified_base 7: mod_base = OTHER; note = 2'O-methyl adenosine
  modified_base 8: mod_base = OTHER; note = 2'-fluoro cytidine
  modified_base 9: mod_base = OTHER; note = 2'O-methyl cytidine
  modified_base 10: mod_base = OTHER; note = 2'-fluoro adenosine
  modified_base 11: mod_base = OTHER; note = 2'O-methyl guanosine
  modified_base 12: mod_base = OTHER; note = 2'-fluoro adenosine
  modified_base 13: mod_base = OTHER; note = 2'O-methyl adenosine
  modified_base 14: mod_base = OTHER; note = 2'-fluoro cytidine
  modified_base 15: mod_base = OTHER; note = 2'O-methyl guanosine
  modified_base 16: mod_base = OTHER; note = 2'-fluoro uridine
  modified_base 17: mod_base = OTHER; note = 2'O-methyl uridine
  modified_base 18: mod_base = OTHER; note = 2'-fluoro uridine
  modified_base 19: mod_base = OTHER; note = 2'O-methyl uridine
  modified_base 20: mod_base = OTHER; note = 2'-fluoro cytidine
  modified_base 21: mod_base = OTHER; note = 2'O-methyl cytidine phosphorothioate
  modified_base 22: mod_base = OTHER; note = 2'O-methyl uridine phosphorothioate
  modified_base 23: mod_base = OTHER; note = 2'O-methyl uridine
tcagacaccagaacgttttcctt

SEQ ID NO: 1805 - RNA, 23 nt, synthetic construct
  source 1..23: mol_type = other RNA
  modified_base 1: mod_base = OTHER; note = 5' vinyl phosphonate 2'O-methyl adenosine phosphorothioate
  modified_base 2: mod_base = OTHER; note = 2'-fluoro adenosine phosphorothioate
  modified_base 3: mod_base = OTHER; note = 2'O-methyl guanosine
  modified_base 4: mod_base = OTHER; note = 2'-fluoro uridine
  modified_base 5: mod_base = OTHER; note = 2'O-methyl cytidine
  modified_base 6: mod_base = OTHER; note = 2'-fluoro adenosine
  modified_base 7: mod_base = OTHER; note = 2'O-methyl guanosine
  modified_base 8: mod_base = OTHER; note = 2'-fluoro adenosine
  modified_base 9: mod_base = OTHER; note = 2'O-methyl cytidine
  modified_base 10: mod_base = OTHER; note = 2'-fluoro adenosine
  modified_base 11: mod_base = OTHER; note = 2'O-methyl cytidine
  modified_base 12: mod_base = OTHER; note = 2'-fluoro cytidine
  modified_base 13: mod_base = OTHER; note = 2'O-methyl adenosine
  modified_base 14: mod_base = OTHER; note = 2'-fluoro guanosine
  modified_base 15: mod_base = OTHER; note = 2'O-methyl adenosine
  modified_base 16: mod_base = OTHER; note = 2'-fluoro adenosine
  modified_base 17: mod_base = OTHER; note = 2'O-methyl cytidine
  modified_base 18: mod_base = OTHER; note = 2'-fluoro guanosine
  modified_base 19: mod_base = OTHER; note = 2'O-methyl uridine
  modified_base 20: mod_base = OTHER; note = 2'-fluoro uridine
  modified_base 21: mod_base = OTHER; note = 2'O-methyl uridine phosphorothioate
  modified_base 22: mod_base = OTHER; note = 2'O-methyl uridine phosphorothioate
  modified_base 23: mod_base = OTHER; note = 2'O-methyl uridine
aagtcagacaccagaacgttttt

SEQ ID NO: 1806 - RNA, 23 nt, synthetic construct
  source 1..23: mol_type = other RNA
  modified_base 1: mod_base = OTHER; note = 5' vinyl phosphonate 2'O-methyl adenosine phosphorothioate
  modified_base 2: mod_base = OTHER; note = 2'-fluoro adenosine phosphorothioate
  modified_base 3: mod_base = OTHER; note = 2'O-methyl adenosine
  modified_base 4: mod_base = OTHER; note = 2'-fluoro guanosine
  modified_base 5: mod_base = OTHER; note = 2'O-methyl uridine
  modified_base 6: mod_base = OTHER; note = 2'-fluoro cytidine
  modified_base 7: mod_base = OTHER; note = 2'O-methyl adenosine
  modified_base 8: mod_base = OTHER; note = 2'-fluoro guanosine
  modified_base 9: mod_base = OTHER; note = 2'O-methyl adenosine
  modified_base 10: mod_base = OTHER; note = 2'-fluoro cytidine
  modified_base 11: mod_base = OTHER; note = 2'O-methyl adenosine
  modified_base 12: mod_base = OTHER; note = 2'-fluoro cytidine
  modified_base 13: mod_base = OTHER; note = 2'O-methyl cytidine
  modified_base 14: mod_base = OTHER; note = 2'-fluoro adenosine
  modified_base 15: mod_base = OTHER; note = 2'O-methyl guanosine
  modified_base 16: mod_base = OTHER; note = 2'-fluoro adenosine
  modified_base 17: mod_base = OTHER; note = 2'O-methyl adenosine
  modified_base 18: mod_base = OTHER; note = 2'-fluoro cytidine
  modified_base 19: mod_base = OTHER; note = 2'O-methyl guanosine
  modified_base 20: mod_base = OTHER; note = 2'-fluoro uridine
  modified_base 21: mod_base = OTHER; note = 2'O-methyl uridine phosphorothioate
  modified_base 22: mod_base = OTHER; note = 2'O-methyl uridine phosphorothioate
  modified_base 23: mod_base = OTHER; note = 2'O-methyl uridine
aaagtcagacaccagaacgtttt

SEQ ID NO: 1807 - RNA, 23 nt, synthetic construct
  source 1..23: mol_type = other RNA
  modified_base 1: mod_base = OTHER; note = 5' vinyl phosphonate 2'O-methyl guanosine phosphorothioate
  modified_base 2: mod_base = OTHER; note = 2'-fluoro adenosine phosphorothioate
  modified_base 3: mod_base = OTHER; note = 2'O-methyl adenosine
  modified_base 4: mod_base = OTHER; note = 2'-fluoro adenosine
  modified_base 5: mod_base = OTHER; note = 2'O-methyl guanosine
  modified_base 6: mod_base = OTHER; note = 2'-fluoro uridine
  modified_base 7: mod_base = OTHER; note = 2'O-methyl cytidine
  modified_base 8: mod_base = OTHER; note = 2'-fluoro adenosine
  modified_base 9: mod_base = OTHER; note = 2'O-methyl guanosine
  modified_base 10: mod_base = OTHER; note = 2'-fluoro adenosine
  modified_base 11: mod_base = OTHER; note = 2'O-methyl cytidine
  modified_base 12: mod_base = OTHER; note = 2'-fluoro adenosine
  modified_base 13: mod_base = OTHER; note = 2'O-methyl cytidine
  modified_base 14: mod_base = OTHER; note = 2'-fluoro cytidine
  modified_base 15: mod_base = OTHER; note = 2'O-methyl adenosine
  modified_base 16: mod_base = OTHER; note = 2'-fluoro guanosine
  modified_base 17: mod_base = OTHER; note = 2'O-methyl adenosine
  modified_base 18: mod_base = OTHER; note = 2'-fluoro adenosine
  modified_base 19: mod_base = OTHER; note = 2'O-methyl cytidine
  modified_base 20: mod_base = OTHER; note = 2'-fluoro guanosine
  modified_base 21: mod_base = OTHER; note = 2'O-methyl uridine phosphorothioate
  modified_base 22: mod_base = OTHER; note = 2'O-methyl uridine phosphorothioate
  modified_base 23: mod_base = OTHER; note = 2'O-methyl uridine
gaaagtcagacaccagaacgttt

SEQ ID NO: 1808 - RNA, 23 nt, synthetic construct
  source 1..23: mol_type = other RNA
  modified_base 1: mod_base = OTHER; note = 5' vinyl phosphonate 2'O-methyl cytidine phosphorothioate
  modified_base 2: mod_base = OTHER; note = 2'-fluoro guanosine phosphorothioate
  modified_base 3: mod_base = OTHER; note = 2'O-methyl adenosine
  modified_base 4: mod_base = OTHER; note = 2'-fluoro adenosine
  modified_base 5: mod_base = OTHER; note = 2'O-methyl adenosine
  modified_base 6: mod_base = OTHER; note = 2'-fluoro guanosine
  modified_base 7: mod_base = OTHER; note = 2'O-methyl uridine
  modified_base 8: mod_base = OTHER; note = 2'-fluoro cytidine
  modified_base 9: mod_base = OTHER; note = 2'O-methyl adenosine
  modified_base 10: mod_base = OTHER; note = 2'-fluoro guanosine
  modified_base 11: mod_base = OTHER; note = 2'O-methyl adenosine
  modified_base 12: mod_base = OTHER; note = 2'-fluoro cytidine
  modified_base 13: mod_base = OTHER; note = 2'O-methyl adenosine
  modified_base 14: mod_base = OTHER; note = 2'-fluoro cytidine
  modified_base 15: mod_base = OTHER; note = 2'O-methyl cytidine
  modified_base 16: mod_base = OTHER; note = 2'-fluoro adenosine
  modified_base 17: mod_base = OTHER; note = 2'O-methyl guanosine
  modified_base 18: mod_base = OTHER; note = 2'-fluoro adenosine
  modified_base 19: mod_base = OTHER; note = 2'O-methyl adenosine
  modified_base 20: mod_base = OTHER; note = 2'-fluoro cytidine
  modified_base 21: mod_base = OTHER; note = 2'O-methyl guanosine phosphorothioate
  modified_base 22: mod_base = OTHER; note = 2'O-methyl uridine phosphorothioate
  modified_base 23: mod_base = OTHER; note = 2'O-methyl uridine
cgaaagtcagacaccagaacgtt

SEQ ID NO: 1809 - RNA, 23 nt, synthetic construct
  source 1..23: mol_type = other RNA
  modified_base 1: mod_base = OTHER; note = 5' vinyl phosphonate 2'O-methyl guanosine phosphorothioate
  modified_base 2: mod_base = OTHER; note = 2'-fluoro guanosine phosphorothioate
  modified_base 3: mod_base = OTHER; note = 2'O-methyl adenosine
  modified_base 4: mod_base = OTHER; note = 2'-fluoro cytidine
  modified_base 5: mod_base = OTHER; note = 2'O-methyl cytidine
  modified_base 6: mod_base = OTHER; note = 2'-fluoro guanosine
  modified_base 7: mod_base = OTHER; note = 2'O-methyl adenosine
  modified_base 8: mod_base = OTHER; note = 2'-fluoro adenosine
  modified_base 9: mod_base = OTHER; note = 2'O-methyl adenosine
  modified_base 10: mod_base = OTHER; note = 2'-fluoro guanosine
  modified_base 11: mod_base = OTHER; note = 2'O-methyl uridine
  modified_base 12: mod_base = OTHER; note = 2'-fluoro cytidine
  modified_base 13: mod_base = OTHER; note = 2'O-methyl adenosine
  modified_base 14: mod_base = OTHER; note = 2'-fluoro guanosine
  modified_base 15: mod_base = OTHER; note = 2'O-methyl adenosine
  modified_base 16: mod_base = OTHER; note = 2'-fluoro cytidine
  modified_base 17: mod_base = OTHER; note = 2'O-methyl adenosine
  modified_base 18: mod_base = OTHER; note = 2'-fluoro cytidine
  modified_base 19: mod_base = OTHER; note = 2'O-methyl cytidine
  modified_base 20: mod_base = OTHER; note = 2'-fluoro adenosine
  modified_base 21: mod_base = OTHER; note = 2'O-methyl guanosine phosphorothioate
  modified_base 22: mod_base = OTHER; note = 2'O-methyl uridine phosphorothioate
  modified_base 23: mod_base = OTHER; note = 2'O-methyl uridine
ggaccgaaagtcagacaccagtt

SEQ ID NO: 1810 - RNA, 23 nt, synthetic construct
  source 1..23: mol_type = other RNA
  modified_base 1: mod_base = OTHER; note = 5' vinyl phosphonate 2'O-methyl uridine phosphorothioate
  modified_base 2: mod_base = OTHER; note = 2'-fluoro guanosine phosphorothioate
  modified_base 3: mod_base = OTHER; note = 2'O-methyl guanosine
  modified_base 4: mod_base = OTHER; note = 2'-fluoro adenosine
  modified_base 5: mod_base = OTHER; note = 2'O-methyl cytidine
  modified_base 6: mod_base = OTHER; note = 2'-fluoro cytidine
  modified_base 7: mod_base = OTHER; note = 2'O-methyl guanosine
  modified_base 8: mod_base = OTHER; note = 2'-fluoro adenosine
  modified_base 9: mod_base = OTHER; note = 2'O-methyl adenosine
  modified_base 10: mod_base = OTHER; note = 2'-fluoro adenosine
  modified_base 11: mod_base = OTHER; note = 2'O-methyl guanosine
  modified_base 12: mod_base = OTHER; note = 2'-fluoro uridine
  modified_base 13: mod_base = OTHER; note = 2'O-methyl cytidine
  modified_base 14: mod_base = OTHER; note = 2'-fluoro adenosine
  modified_base 15: mod_base = OTHER; note = 2'O-methyl guanosine
  modified_base 16: mod_base = OTHER; note = 2'-fluoro adenosine
  modified_base 17: mod_base = OTHER; note = 2'O-methyl cytidine
  modified_base 18: mod_base = OTHER; note = 2'-fluoro adenosine
  modified_base 19: mod_base = OTHER; note = 2'O-methyl cytidine
  modified_base 20: mod_base = OTHER; note = 2'-fluoro cytidine
  modified_base 21: mod_base = OTHER; note = 2'O-methyl adenosine phosphorothioate
  modified_base 22: mod_base = OTHER; note = 2'O-methyl uridine phosphorothioate
  modified_base 23: mod_base = OTHER; note = 2'O-methyl uridine
tggaccgaaagtcagacaccatt

SEQ ID NO: 1811 - RNA, 23 nt, synthetic construct
  source 1..23: mol_type = other RNA
  modified_base 1: mod_base = OTHER; note = 5' vinyl phosphonate 2'O-methyl uridine phosphorothioate
  modified_base 2: mod_base = OTHER; note = 2'-fluoro uridine phosphorothioate
  modified_base 3: mod_base = OTHER; note = 2'O-methyl guanosine
  modified_base 4: mod_base = OTHER; note = 2'-fluoro guanosine
  modified_base 5: mod_base = OTHER; note = 2'O-methyl adenosine
  modified_base 6: mod_base = OTHER; note = 2'-fluoro cytidine
  modified_base 7: mod_base = OTHER; note = 2'O-methyl cytidine
  modified_base 8: mod_base = OTHER; note = 2'-fluoro guanosine
  modified_base 9: mod_base = OTHER; note = 2'O-methyl adenosine
  modified_base 10: mod_base = OTHER; note = 2'-fluoro adenosine
  modified_base 11: mod_base = OTHER; note = 2'O-methyl adenosine
  modified_base 12: mod_base = OTHER; note = 2'-fluoro guanosine
  modified_base 13: mod_base = OTHER; note = 2'O-methyl uridine
  modified_base 14: mod_base = OTHER; note = 2'-fluoro cytidine
  modified_base 15: mod_base = OTHER; note = 2'O-methyl adenosine
  modified_base 16: mod_base = OTHER; note = 2'-fluoro guanosine
  modified_base 17: mod_base = OTHER; note = 2'O-methyl adenosine
  modified_base 18: mod_base = OTHER; note = 2'-fluoro cytidine
  modified_base 19: mod_base = OTHER; note = 2'O-methyl adenosine
  modified_base 20: mod_base = OTHER; note = 2'-fluoro cytidine
  modified_base 21: mod_base = OTHER; note = 2'O-methyl cytidine phosphorothioate
  modified_base 22: mod_base = OTHER; note = 2'O-methyl uridine phosphorothioate
  modified_base 23: mod_base = OTHER; note = 2'O-methyl uridine
ttggaccgaaagtcagacacctt

SEQ ID NO: 1812 - RNA, 23 nt, synthetic construct
  source 1..23: mol_type = other RNA
  modified_base 1: mod_base = OTHER; note = 5' vinyl phosphonate 2'O-methyl uridine phosphorothioate
  modified_base 2: mod_base = OTHER; note = 2'-fluoro uridine phosphorothioate
  modified_base 3: mod_base = OTHER; note = 2'O-methyl uridine
  modified_base 4: mod_base = OTHER; note = 2'-fluoro guanosine
  modified_base 5: mod_base = OTHER; note = 2'O-methyl guanosine
  modified_base 6: mod_base = OTHER; note = 2'-fluoro adenosine
  modified_base 7: mod_base = OTHER; note = 2'O-methyl cytidine
  modified_base 8: mod_base = OTHER; note = 2'-fluoro cytidine
  modified_base 9: mod_base = OTHER; note = 2'O-methyl guanosine
  modified_base 10: mod_base = OTHER; note = 2'-fluoro adenosine
  modified_base 11: mod_base = OTHER; note = 2'O-methyl adenosine
  modified_base 12: mod_base = OTHER; note = 2'-fluoro adenosine
  modified_base 13: mod_base = OTHER; note = 2'O-methyl guanosine
  modified_base 14: mod_base = OTHER; note = 2'-fluoro uridine
  modified_base 15: mod_base = OTHER; note = 2'O-methyl cytidine
  modified_base 16: mod_base = OTHER; note = 2'-fluoro adenosine
  modified_base 17: mod_base = OTHER; note = 2'O-methyl guanosine
  modified_base 18: mod_base = OTHER; note = 2'-fluoro adenosine
  modified_base 19: mod_base = OTHER; note = 2'O-methyl cytidine
  modified_base 20: mod_base = OTHER; note = 2'-fluoro adenosine
  modified_base 21: mod_base = OTHER; note = 2'O-methyl cytidine phosphorothioate
  modified_base 22: mod_base = OTHER; note = 2'O-methyl uridine phosphorothioate
  modified_base 23: mod_base = OTHER; note = 2'O-methyl uridine
tttggaccgaaagtcagacactt

SEQ ID NO: 1813 - RNA, 23 nt, synthetic construct
  source 1..23: mol_type = other RNA
  modified_base 1: mod_base = OTHER; note = 5' vinyl phosphonate 2'O-methyl uridine phosphorothioate
  modified_base 2: mod_base = OTHER; note = 2'-fluoro cytidine phosphorothioate
  modified_base 3: mod_base = OTHER; note = 2'O-methyl uridine
  modified_base 4: mod_base = OTHER; note = 2'-fluoro uridine
  modified_base 5: mod_base = OTHER; note = 2'O-methyl uridine
  modified_base 6: mod_base = OTHER; note = 2'-fluoro guanosine
  modified_base 7: mod_base = OTHER; note = 2'O-methyl guanosine
  modified_base 8: mod_base = OTHER; note = 2'-fluoro adenosine
  modified_base 9: mod_base = OTHER; note = 2'O-methyl cytidine
  modified_base 10: mod_base = OTHER; note = 2'-fluoro cytidine
  modified_base 11: mod_base = OTHER; note = 2'O-methyl guanosine
  modified_base 12: mod_base = OTHER; note = 2'-fluoro adenosine
  modified_base 13: mod_base = OTHER; note = 2'O-methyl adenosine
  modified_base 14: mod_base = OTHER; note = 2'-fluoro adenosine
  modified_base 15: mod_base = OTHER; note = 2'O-methyl guanosine
  modified_base 16: mod_base = OTHER; note = 2'-fluoro uridine
  modified_base 17: mod_base = OTHER; note = 2'O-methyl cytidine
  modified_base 18: mod_base = OTHER; note = 2'-fluoro adenosine
  modified_base 19: mod_base = OTHER; note = 2'O-methyl guanosine
  modified_base 20: mod_base = OTHER; note = 2'-fluoro adenosine
  modified_base 21: mod_base = OTHER; note = 2'O-methyl cytidine phosphorothioate
  modified_base 22: mod_base = OTHER; note = 2'O-methyl uridine phosphorothioate
  modified_base 23: mod_base = OTHER; note = 2'O-methyl uridine
tctttggaccgaaagtcagactt

SEQ ID NO: 1814 - RNA, 23 nt, synthetic construct
  source 1..23: mol_type = other RNA
  modified_base 1: mod_base = OTHER; note = 5' vinyl phosphonate 2'O-methyl guanosine phosphorothioate
  modified_base 2: mod_base = OTHER; note = 2'-fluoro uridine phosphorothioate
  modified_base 3: mod_base = OTHER; note = 2'O-methyl cytidine
  modified_base 4: mod_base = OTHER; note = 2'-fluoro uridine
  modified_base 5: mod_base = OTHER; note = 2'O-methyl uridine
  modified_base 6: mod_base = OTHER; note = 2'-fluoro uridine
  modified_base 7: mod_base = OTHER; note = 2'O-methyl guanosine
  modified_base 8: mod_base = OTHER; note = 2'-fluoro guanosine
  modified_base 9: mod_base = OTHER; note = 2'O-methyl adenosine
  modified_base 10: mod_base = OTHER; note = 2'-fluoro cytidine
  modified_base 11: mod_base = OTHER; note = 2'O-methyl cytidine
  modified_base 12: mod_base = OTHER; note = 2'-fluoro guanosine
  modified_base 13: mod_base = OTHER; note = 2'O-methyl adenosine
  modified_base 14: mod_base = OTHER; note = 2'-fluoro adenosine
  modified_base 15: mod_base = OTHER; note = 2'O-methyl adenosine
  modified_base 16: mod_base = OTHER; note = 2'-fluoro guanosine
  modified_base 17: mod_base = OTHER; note = 2'O-methyl uridine
  modified_base 18: mod_base = OTHER; note = 2'-fluoro cytidine
  modified_base 19: mod_base = OTHER; note = 2'O-methyl adenosine
  modified_base 20: mod_base = OTHER; note = 2'-fluoro guanosine
  modified_base 21: mod_base = OTHER; note = 2'O-methyl adenosine phosphorothioate
  modified_base 22: mod_base = OTHER; note = 2'O-methyl uridine phosphorothioate
  modified_base 23: mod_base = OTHER; note = 2'O-methyl uridine
gtctttggaccgaaagtcagatt

SEQ ID NO: 1815 - RNA, 23 nt, synthetic construct
  source 1..23: mol_type = other RNA
  modified_base 1: mod_base = OTHER; note = 5' vinyl phosphonate 2'O-methyl cytidine phosphorothioate
  modified_base 2: mod_base = OTHER; note = 2'-fluoro cytidine phosphorothioate
  modified_base 3: mod_base = OTHER; note = 2'O-methyl adenosine
  modified_base 4: mod_base = OTHER; note = 2'-fluoro cytidine
  modified_base 5: mod_base = OTHER; note = 2'O-methyl guanosine
  modified_base 6: mod_base = OTHER; note = 2'-fluoro adenosine
  modified_base 7: mod_base = OTHER; note = 2'O-methyl cytidine
  modified_base 8: mod_base = OTHER; note = 2'-fluoro uridine
  modified_base 9: mod_base = OTHER; note = 2'O-methyl uridine
  modified_base 10: mod_base = OTHER; note = 2'-fluoro cytidine
  modified_base 11: mod_base = OTHER; note = 2'O-methyl guanosine
  modified_base 12: mod_base = OTHER; note = 2'-fluoro uridine
  modified_base 13: mod_base = OTHER; note = 2'O-methyl cytidine
  modified_base 14: mod_base = OTHER; note = 2'-fluoro uridine
  modified_base 15: mod_base = OTHER; note = 2'O-methyl uridine
  modified_base 16: mod_base = OTHER; note = 2'-fluoro uridine
  modified_base 17: mod_base = OTHER; note = 2'O-methyl guanosine
  modified_base 18: mod_base = OTHER; note = 2'-fluoro guanosine
  modified_base 19: mod_base = OTHER; note = 2'O-methyl adenosine
  modified_base 20: mod_base = OTHER; note = 2'-fluoro cytidine
  modified_base 21: mod_base = OTHER; note = 2'O-methyl cytidine phosphorothioate
  modified_base 22: mod_base = OTHER; note = 2'O-methyl uridine phosphorothioate
  modified_base 23: mod_base = OTHER; note = 2'O-methyl uridine
ccacgacttcgtctttggacctt

SEQ ID NO: 1816 - RNA, 23 nt, synthetic construct
  source 1..23: mol_type = other RNA
  modified_base 1: mod_base = OTHER; note = 5' vinyl phosphonate 2'O-methyl uridine phosphorothioate
  modified_base 2: mod_base = OTHER; note = 2'-fluoro cytidine phosphorothioate
  modified_base 3: mod_base = OTHER; note = 2'O-methyl cytidine
  modified_base 4: mod_base = OTHER; note = 2'-fluoro adenosine
  modified_base 5: mod_base = OTHER; note = 2'O-methyl cytidine
  modified_base 6: mod_base = OTHER; note = 2'-fluoro guanosine
  modified_base 7: mod_base = OTHER; note = 2'O-methyl adenosine
  modified_base 8: mod_base = OTHER; note = 2'-fluoro cytidine
  modified_base 9: mod_base = OTHER; note = 2'O-methyl uridine
  modified_base 10: mod_base = OTHER; note = 2'-fluoro uridine
  modified_base 11: mod_base = OTHER; note = 2'O-methyl cytidine
  modified_base 12: mod_base = OTHER; note = 2'-fluoro guanosine
  modified_base 13: mod_base = OTHER; note = 2'O-methyl uridine
  modified_base 14: mod_base = OTHER; note = 2'-fluoro cytidine
  modified_base 15: mod_base = OTHER; note = 2'O-methyl uridine
  modified_base 16: mod_base = OTHER; note = 2'-fluoro uridine
  modified_base 17: mod_base = OTHER; note = 2'O-methyl uridine
  modified_base 18: mod_base = OTHER; note = 2'-fluoro guanosine
  modified_base 19: mod_base = OTHER; note = 2'O-methyl guanosine
  modified_base 20: mod_base = OTHER; note = 2'-fluoro adenosine
  modified_base 21: mod_base = OTHER; note = 2'O-methyl cytidine phosphorothioate
  modified_base 22: mod_base = OTHER; note = 2'O-methyl uridine phosphorothioate
  modified_base 23: mod_base = OTHER; note = 2'O-methyl uridine
tccacgacttcgtctttggactt

SEQ ID NO: 1817 - RNA, 23 nt, synthetic construct
  source 1..23: mol_type = other RNA
  modified_base 1: mod_base = OTHER; note = 5' vinyl phosphonate 2'O-methyl adenosine phosphorothioate
  modified_base 2: mod_base = OTHER; note = 2'-fluoro uridine phosphorothioate
  modified_base 3: mod_base = OTHER; note = 2'O-methyl cytidine
  modified_base 4: mod_base = OTHER; note = 2'-fluoro cytidine
  modified_base 5: mod_base = OTHER; note = 2'O-methyl adenosine
  modified_base 6: mod_base = OTHER; note = 2'-fluoro cytidine
  modified_base 7: mod_base = OTHER; note = 2'O-methyl guanosine
  modified_base 8: mod_base = OTHER; note = 2'-fluoro adenosine
  modified_base 9: mod_base = OTHER; note = 2'O-methyl cytidine
  modified_base 10: mod_base = OTHER; note = 2'-fluoro uridine
  modified_base 11: mod_base = OTHER; note = 2'O-methyl uridine
  modified_base 12: mod_base = OTHER; note = 2'-fluoro cytidine
  modified_base 13: mod_base = OTHER; note = 2'O-methyl guanosine
  modified_base 14: mod_base = OTHER; note = 2'-fluoro uridine
  modified_base 15: mod_base = OTHER; note = 2'O-methyl cytidine
  modified_base 16: mod_base = OTHER; note = 2'-fluoro uridine
  modified_base 17: mod_base = OTHER; note = 2'O-methyl uridine
  modified_base 18: mod_base = OTHER; note = 2'-fluoro uridine
  modified_base 19: mod_base = OTHER; note = 2'O-methyl guanosine
  modified_base 20: mod_base = OTHER; note = 2'-fluoro guanosine
  modified_base 21: mod_base = OTHER; note = 2'O-methyl adenosine phosphorothioate
  modified_base 22: mod_base = OTHER; note = 2'O-methyl uridine phosphorothioate
  modified_base 23: mod_base = OTHER; note = 2'O-methyl uridine
atccacgacttcgtctttggatt

SEQ ID NO: 1818 - RNA, 23 nt, synthetic construct
  source 1..23: mol_type = other RNA
  modified_base 1: mod_base = OTHER; note = 5' vinyl phosphonate 2'O-methyl guanosine phosphorothioate
  modified_base 2: mod_base = OTHER; note = 2'-fluoro cytidine phosphorothioate
  modified_base 3: mod_base = OTHER; note = 2'O-methyl adenosine
  modified_base 4: mod_base = OTHER; note = 2'-fluoro uridine
  modified_base 5: mod_base = OTHER; note = 2'O-methyl cytidine
  modified_base 6: mod_base = OTHER; note = 2'-fluoro cytidine
  modified_base 7: mod_base = OTHER; note = 2'O-methyl adenosine
  modified_base 8: mod_base = OTHER; note = 2'-fluoro cytidine
  modified_base 9: mod_base = OTHER; note = 2'O-methyl guanosine
  modified_base 10: mod_base = OTHER; note = 2'-fluoro adenosine
  modified_base 11: mod_base = OTHER; note = 2'O-methyl cytidine
  modified_base 12: mod_base = OTHER; note = 2'-fluoro uridine
  modified_base 13: mod_base = OTHER; note = 2'O-methyl uridine
  modified_base 14: mod_base = OTHER; note = 2'-fluoro cytidine
  modified_base 15: mod_base = OTHER; note = 2'O-methyl guanosine
  modified_base 16: mod_base = OTHER; note = 2'-fluoro uridine
  modified_base 17: mod_base = OTHER; note = 2'O-methyl cytidine
  modified_base 18: mod_base = OTHER; note = 2'-fluoro uridine
  modified_base 19: mod_base = OTHER; note = 2'O-methyl uridine
  modified_base 20: mod_base = OTHER; note = 2'-fluoro uridine
  modified_base 21: mod_base = OTHER; note = 2'O-methyl guanosine phosphorothioate
  modified_base 22: mod_base = OTHER; note = 2'O-methyl uridine phosphorothioate
  modified_base 23: mod_base = OTHER; note = 2'O-methyl uridine
gcatccacgacttcgtctttgtt

SEQ ID NO: 1819 - RNA, 23 nt, synthetic construct
  source 1..23: mol_type = other RNA
  modified_base 1: mod_base = OTHER; note = 5' vinyl phosphonate 2'O-methyl guanosine phosphorothioate
  modified_base 2: mod_base = OTHER; note = 2'-fluoro guanosine phosphorothioate
  modified_base 3: mod_base = OTHER; note = 2'O-methyl cytidine
  modified_base 4: mod_base = OTHER; note = 2'-fluoro adenosine
  modified_base 5: mod_base = OTHER; note = 2'O-methyl uridine
  modified_base 6: mod_base = OTHER; note = 2'-fluoro cytidine
  modified_base 7: mod_base = OTHER; note = 2'O-methyl cytidine
  modified_base 8: mod_base = OTHER; note = 2'-fluoro adenosine
  modified_base 9: mod_base = OTHER; note = 2'O-methyl cytidine
  modified_base 10: mod_base = OTHER; note = 2'-fluoro guanosine
  modified_base 11: mod_base = OTHER; note = 2'O-methyl adenosine
  modified_base 12: mod_base = OTHER; note = 2'-fluoro cytidine
  modified_base 13: mod_base = OTHER; note = 2'O-methyl uridine
  modified_base 14: mod_base = OTHER; note = 2'-fluoro uridine
  modified_base 15: mod_base = OTHER; note = 2'O-methyl cytidine
  modified_base 16: mod_base = OTHER; note = 2'-fluoro guanosine
  modified_base 17: mod_base = OTHER; note = 2'O-methyl uridine
  modified_base 18: mod_base = OTHER; note = 2'-fluoro cytidine
  modified_base 19: mod_base = OTHER; note = 2'O-methyl uridine
  modified_base 20: mod_base = OTHER; note = 2'-fluoro uridine
  modified_base 21: mod_base = OTHER; note = 2'O-methyl uridine phosphorothioate
  modified_base 22: mod_base = OTHER; note = 2'O-methyl uridine phosphorothioate
  modified_base 23: mod_base = OTHER; note = 2'O-methyl uridine
ggcatccacgacttcgtcttttt

SEQ ID NO: 1820 - RNA, 23 nt, synthetic construct
  source 1..23: mol_type = other RNA
  modified_base 1: mod_base = OTHER; note = 5' vinyl phosphonate 2'O-methyl adenosine phosphorothioate
  modified_base 2: mod_base = OTHER; note = 2'-fluoro guanosine phosphorothioate
  modified_base 3: mod_base = OTHER; note = 2'O-methyl guanosine
  modified_base 4: mod_base = OTHER; note = 2'-fluoro cytidine
  modified_base 5: mod_base = OTHER; note = 2'O-methyl adenosine
  modified_base 6: mod_base = OTHER; note = 2'-fluoro uridine
  modified_base 7: mod_base = OTHER; note = 2'O-methyl cytidine
  modified_base 8: mod_base = OTHER; note = 2'-fluoro cytidine
  modified_base 9: mod_base = OTHER; note = 2'O-methyl adenosine
  modified_base 10: mod_base = OTHER; note = 2'-fluoro cytidine
  modified_base 11: mod_base = OTHER; note = 2'O-methyl guanosine
  modified_base 12: mod_base = OTHER; note = 2'-fluoro adenosine
  modified_base 13: mod_base = OTHER; note = 2'O-methyl cytidine
  modified_base 14: mod_base = OTHER; note = 2'-fluoro uridine
  modified_base 15: mod_base = OTHER; note = 2'O-methyl uridine
  modified_base 16: mod_base = OTHER; note = 2'-fluoro cytidine
  modified_base 17: mod_base = OTHER; note = 2'O-methyl guanosine
  modified_base 18: mod_base = OTHER; note = 2'-fluoro uridine
  modified_base 19: mod_base = OTHER; note = 2'O-methyl cytidine
  modified_base 20: mod_base = OTHER; note = 2'-fluoro uridine
  modified_base 21: mod_base = OTHER; note = 2'O-methyl uridine phosphorothioate
  modified_base 22: mod_base = OTHER; note = 2'O-methyl uridine phosphorothioate
  modified_base 23: mod_base = OTHER; note = 2'O-methyl uridine
aggcatccacgacttcgtctttt

SEQ ID NO: 1821 - RNA, 23 nt, synthetic construct
  source 1..23: mol_type = other RNA
  modified_base 1: mod_base = OTHER; note = 5' vinyl phosphonate 2'O-methyl adenosine phosphorothioate
  modified_base 2: mod_base = OTHER; note = 2'-fluoro adenosine phosphorothioate
  modified_base 3: mod_base = OTHER; note = 2'O-methyl guanosine
  modified_base 4: mod_base = OTHER; note = 2'-fluoro guanosine
  modified_base 5: mod_base = OTHER; note = 2'O-methyl cytidine
  modified_base 6: mod_base = OTHER; note = 2'-fluoro adenosine
  modified_base 7: mod_base = OTHER; note = 2'O-methyl uridine
  modified_base 8: mod_base = OTHER; note = 2'-fluoro cytidine
  modified_base 9: mod_base = OTHER; note = 2'O-methyl cytidine
  modified_base 10: mod_base = OTHER; note = 2'-fluoro adenosine
  modified_base 11: mod_base = OTHER; note = 2'O-methyl cytidine
  modified_base 12: mod_base = OTHER; note = 2'-fluoro guanosine
  modified_base 13: mod_base = OTHER; note = 2'O-methyl adenosine
  modified_base 14: mod_base = OTHER; note = 2'-fluoro cytidine
  modified_base 15: mod_base = OTHER; note = 2'O-methyl uridine
  modified_base 16: mod_base = OTHER; note = 2'-fluoro uridine
  modified_base 17: mod_base = OTHER; note = 2'O-methyl cytidine
  modified_base 18: mod_base = OTHER; note = 2'-fluoro guanosine
  modified_base 19: mod_base = OTHER; note = 2'O-methyl uridine
  modified_base 20: mod_base = OTHER; note = 2'-fluoro cytidine
  modified_base 21: mod_base = OTHER; note = 2'O-methyl uridine phosphorothioate
  modified_base 22: mod_base = OTHER; note = 2'O-methyl uridine phosphorothioate
  modified_base 23: mod_base = OTHER; note = 2'O-methyl uridine
aaggcatccacgacttcgtcttt

SEQ ID NO: 1822 - RNA, 23 nt, synthetic construct
  source 1..23: mol_type = other RNA
  modified_base 1: mod_base = OTHER; note = 5' vinyl phosphonate 2'O-methyl cytidine phosphorothioate
  modified_base 2: mod_base = OTHER; note = 2'-fluoro cytidine phosphorothioate
  modified_base 3: mod_base = OTHER; note = 2'O-methyl adenosine
  modified_base 4: mod_base = OTHER; note = 2'-fluoro adenosine
  modified_base 5: mod_base = OTHER; note = 2'O-methyl guanosine
  modified_base 6: mod_base = OTHER; note = 2'-fluoro guanosine
  modified_base 7: mod_base = OTHER; note = 2'O-methyl cytidine
  modified_base 8: mod_base = OTHER; note = 2'-fluoro adenosine
  modified_base 9: mod_base = OTHER; note = 2'O-methyl uridine
  modified_base 10: mod_base = OTHER; note = 2'-fluoro cytidine
  modified_base 11: mod_base = OTHER; note = 2'O-methyl cytidine
  modified_base 12: mod_base = OTHER; note = 2'-fluoro adenosine
  modified_base 13: mod_base = OTHER; note = 2'O-methyl cytidine
  modified_base 14: mod_base = OTHER; note = 2'-fluoro guanosine
  modified_base 15: mod_base = OTHER; note = 2'O-methyl adenosine
  modified_base 16: mod_base = OTHER; note = 2'-fluoro cytidine
  modified_base 17: mod_base = OTHER; note = 2'O-methyl uridine
  modified_base 18: mod_base = OTHER; note = 2'-fluoro uridine
  modified_base 19: mod_base = OTHER; note = 2'O-methyl cytidine
  modified_base 20: mod_base = OTHER; note = 2'-fluoro guanosine
  modified_base 21: mod_base = OTHER; note = 2'O-methyl uridine phosphorothioate
  modified_base 22: mod_base = OTHER; note = 2'O-methyl uridine phosphorothioate
  modified_base 23: mod_base = OTHER; note = 2'O-methyl uridine
ccaaggcatccacgacttcgttt

SEQ ID NO: 1823 - RNA, 23 nt, synthetic construct
  source 1..23: mol_type = other RNA
  modified_base 1: mod_base = OTHER; note = 5' vinyl phosphonate 2'O-methyl adenosine phosphorothioate
  modified_base 2: mod_base = OTHER; note = 2'-fluoro cytidine phosphorothioate
  modified_base 3: mod_base = OTHER; note = 2'O-methyl cytidine
  modified_base 4: mod_base = OTHER; note = 2'-fluoro adenosine
  modified_base 5: mod_base = OTHER; note = 2'O-methyl adenosine
  modified_base 6: mod_base = OTHER; note = 2'-fluoro guanosine
  modified_base 7: mod_base = OTHER; note = 2'O-methyl guanosine
  modified_base 8: mod_base = OTHER; note = 2'-fluoro cytidine
  modified_base 9: mod_base = OTHER; note = 2'O-methyl adenosine
  modified_base 10: mod_base = OTHER; note = 2'-fluoro uridine
  modified_base 11: mod_base = OTHER; note = 2'O-methyl cytidine
  modified_base 12: mod_base = OTHER; note = 2'-fluoro cytidine
  modified_base 13: mod_base = OTHER; note = 2'O-methyl adenosine
  modified_base 14: mod_base = OTHER; note = 2'-fluoro cytidine
  modified_base 15: mod_base = OTHER; note = 2'O-methyl guanosine
  modified_base 16: mod_base = OTHER; note = 2'-fluoro adenosine
  modified_base 17: mod_base = OTHER; note = 2'O-methyl cytidine
  modified_base 18: mod_base = OTHER; note = 2'-fluoro uridine
  modified_base 19: mod_base = OTHER; note = 2'O-methyl uridine
  modified_base 20: mod_base = OTHER; note = 2'-fluoro cytidine
  modified_base 21: mod_base = OTHER; note = 2'O-methyl guanosine phosphorothioate
  modified_base 22: mod_base = OTHER; note = 2'O-methyl uridine phosphorothioate
  modified_base 23: mod_base = OTHER; note = 2'O-methyl uridine
accaaggcatccacgacttcgtt

SEQ ID NO: 1824 - RNA, 23 nt, synthetic construct
  source 1..23: mol_type = other RNA
  modified_base 1: mod_base = OTHER; note = 5' vinyl phosphonate 2'O-methyl uridine phosphorothioate
  modified_base 2: mod_base = OTHER; note = 2'-fluoro adenosine phosphorothioate
  modified_base 3: mod_base = OTHER; note = 2'O-methyl cytidine
  modified_base 4: mod_base = OTHER; note = 2'-fluoro cytidine
  modified_base 5: mod_base = OTHER; note = 2'O-methyl adenosine
  modified_base 6: mod_base = OTHER; note = 2'-fluoro adenosine
  modified_base 7: mod_base = OTHER; note = 2'O-methyl guanosine
  modified_base 8: mod_base = OTHER; note = 2'-fluoro guanosine
  modified_base 9: mod_base = OTHER; note = 2'O-methyl cytidine
  modified_base 10: mod_base = OTHER; note = 2'-fluoro adenosine
  modified_base 11: mod_base = OTHER; note = 2'O-methyl uridine
  modified_base 12: mod_base = OTHER; note = 2'-fluoro cytidine
  modified_base 13: mod_base = OTHER; note = 2'O-methyl cytidine
  modified_base 14: mod_base = OTHER; note = 2'-fluoro adenosine
  modified_base 15: mod_base = OTHER; note = 2'O-methyl cytidine
  modified_base 16: mod_base = OTHER; note = 2'-fluoro guanosine
  modified_base 17: mod_base = OTHER; note = 2'O-methyl adenosine
  modified_base 18: mod_base = OTHER; note = 2'-fluoro cytidine
  modified_base 19: mod_base = OTHER; note = 2'O-methyl uridine
  modified_base 20: mod_base = OTHER; note = 2'-fluoro uridine
  modified_base 21: mod_base = OTHER; note = 2'O-methyl cytidine phosphorothioate
  modified_base 22: mod_base = OTHER; note = 2'O-methyl uridine phosphorothioate
  modified_base 23: mod_base = OTHER; note = 2'O-methyl uridine
taccaaggcatccacgacttctt

SEQ ID NO: 1825 - RNA, 23 nt, synthetic construct
  source 1..23: mol_type = other RNA
  modified_base 1: mod_base = OTHER; note = 5' vinyl phosphonate 2'O-methyl adenosine phosphorothioate
  modified_base 2: mod_base = OTHER; note = 2'-fluoro uridine phosphorothioate
  modified_base 3: mod_base = OTHER; note = 2'O-methyl adenosine
  modified_base 4: mod_base = OTHER; note = 2'-fluoro cytidine
  modified_base 5: mod_base = OTHER; note = 2'O-methyl cytidine
  modified_base 6: mod_base = OTHER; note = 2'-fluoro adenosine
  modified_base 7: mod_base = OTHER; note = 2'O-methyl adenosine
  modified_base 8: mod_base = OTHER; note = 2'-fluoro guanosine
  modified_base 9: mod_base = OTHER; note = 2'O-methyl guanosine
  modified_base 10: mod_base = OTHER; note = 2'-fluoro cytidine
  modified_base 11: mod_base = OTHER; note = 2'O-methyl adenosine
  modified_base 12: mod_base = OTHER; note = 2'-fluoro uridine
  modified_base 13: mod_base = OTHER; note = 2'O-methyl cytidine
  modified_base 14: mod_base = OTHER; note = 2'-fluoro cytidine
  modified_base 15: mod_base = OTHER; note = 2'O-methyl adenosine
  modified_base 16: mod_base = OTHER; note = 2'-fluoro cytidine
  modified_base 17: mod_base = OTHER; note = 2'O-methyl guanosine
  modified_base 18: mod_base = OTHER; note = 2'-fluoro adenosine
  modified_base 19: mod_base = OTHER; note = 2'O-methyl cytidine
  modified_base 20: mod_base = OTHER; note = 2'-fluoro uridine
  modified_base 21: mod_base = OTHER; note = 2'O-methyl uridine phosphorothioate
  modified_base 22: mod_base = OTHER; note = 2'O-methyl uridine phosphorothioate
  modified_base 23: mod_base = OTHER; note = 2'O-methyl uridine
ataccaaggcatccacgactttt

SEQ ID NO: 1826 - RNA, 23 nt, synthetic construct
  source 1..23: mol_type = other RNA
  modified_base 1: mod_base = OTHER; note = 5' vinyl phosphonate 2'O-methyl adenosine phosphorothioate
  modified_base 2: mod_base = OTHER; note = 2'-fluoro cytidine phosphorothioate
  modified_base 3: mod_base = OTHER; note = 2'O-methyl adenosine
  modified_base 4: mod_base = OTHER; note = 2'-fluoro uridine
  modified_base 5: mod_base = OTHER; note = 2'O-methyl adenosine
  modified_base 6: mod_base = OTHER; note = 2'-fluoro cytidine
  modified_base 7: mod_base = OTHER; note = 2'O-methyl cytidine
  modified_base 8: mod_base = OTHER; note = 2'-fluoro adenosine
  modified_base 9: mod_base = OTHER; note = 2'O-methyl adenosine
  modified_base 10: mod_base = OTHER; note = 2'-fluoro guanosine
  modified_base 11: mod_base = OTHER; note = 2'O-methyl guanosine
  modified_base 12: mod_base = OTHER; note = 2'-fluoro cytidine
  modified_base 13: mod_base = OTHER; note = 2'O-methyl adenosine
  modified_base 14: mod_base = OTHER; note = 2'-fluoro uridine
  modified_base 15: mod_base = OTHER; note = 2'O-methyl cytidine
  modified_base 16: mod_base = OTHER; note = 2'-fluoro cytidine
  modified_base 17: mod_base = OTHER; note = 2'O-methyl adenosine
  modified_base 18: mod_base = OTHER; note = 2'-fluoro cytidine
  modified_base 19: mod_base = OTHER; note = 2'O-methyl guanosine
  modified_base 20: mod_base = OTHER; note = 2'-fluoro adenosine
  modified_base 21: mod_base = OTHER; note = 2'O-methyl cytidine phosphorothioate
  modified_base 22: mod_base = OTHER; note = 2'O-methyl uridine phosphorothioate
  modified_base 23: mod_base = OTHER; note = 2'O-methyl uridine
acataccaaggcatccacgactt

SEQ ID NO: 1827 - RNA, 23 nt, synthetic construct
  source 1..23: mol_type = other RNA
  modified_base 1: mod_base = OTHER; note = 5' vinyl phosphonate 2'O-methyl adenosine phosphorothioate
  modified_base 2: mod_base = OTHER; note = 2'-fluoro adenosine phosphorothioate
  modified_base 3: mod_base = OTHER; note = 2'O-methyl cytidine
  modified_base 4: mod_base = OTHER; note = 2'-fluoro adenosine
  modified_base 5: mod_base = OTHER; note = 2'O-methyl uridine
  modified_base 6: mod_base = OTHER; note = 2'-fluoro adenosine
  modified_base 7: mod_base = OTHER; note = 2'O-methyl cytidine
  modified_base 8: mod_base = OTHER; note = 2'-fluoro cytidine
  modified_base 9: mod_base = OTHER; note = 2'O-methyl adenosine
  modified_base 10: mod_base = OTHER; note = 2'-fluoro adenosine
  modified_base 11: mod_base = OTHER; note = 2'O-methyl guanosine
  modified_base 12: mod_base = OTHER; note = 2'-fluoro guanosine
  modified_base 13: mod_base = OTHER; note = 2'O-methyl cytidine
  modified_base 14: mod_base = OTHER; note = 2'-fluoro adenosine
  modified_base 15: mod_base = OTHER; note = 2'O-methyl uridine
  modified_base 16: mod_base = OTHER; note = 2'-fluoro cytidine
  modified_base 17: mod_base = OTHER; note = 2'O-methyl cytidine
  modified_base 18: mod_base = OTHER; note = 2'-fluoro adenosine
  modified_base 19: mod_base = OTHER; note = 2'O-methyl cytidine
  modified_base 20: mod_base = OTHER; note = 2'-fluoro guanosine
  modified_base 21: mod_base = OTHER; note = 2'O-methyl adenosine phosphorothioate
  modified_base 22: mod_base = OTHER; note = 2'O-methyl uridine phosphorothioate
  modified_base 23: mod_base = OTHER; note = 2'O-methyl uridine
aacataccaaggcatccacgatt

SEQ ID NO: 1828 - RNA, 23 nt, synthetic construct
  source 1..23: mol_type = other RNA
  modified_base 1: mod_base = OTHER; note = 5' vinyl phosphonate 2'O-methyl guanosine phosphorothioate
  modified_base 2: mod_base = OTHER; note = 2'-fluoro guanosine phosphorothioate
  modified_base 3: mod_base = OTHER; note = 2'O-methyl adenosine
  modified_base 4: mod_base = OTHER; note = 2'-fluoro adenosine
  modified_base 5: mod_base = OTHER; note = 2'O-methyl cytidine
  modified_base 6: mod_base = OTHER; note = 2'-fluoro adenosine
  modified_base 7: mod_base = OTHER; note = 2'O-methyl uridine
  modified_base 8: mod_base = OTHER; note = 2'-fluoro adenosine
  modified_base 9: mod_base = OTHER; note = 2'O-methyl cytidine
  modified_base 10: mod_base = OTHER; note = 2'-fluoro cytidine
  modified_base 11: mod_base = OTHER; note = 2'O-methyl adenosine
  modified_base 12: mod_base = OTHER; note = 2'-fluoro adenosine
  modified_base 13: mod_base = OTHER; note = 2'O-methyl guanosine
  modified_base 14: mod_base = OTHER; note = 2'-fluoro guanosine
  modified_base 15: mod_base = OTHER; note = 2'O-methyl cytidine
  modified_base 16: mod_base = OTHER; note = 2'-fluoro adenosine
  modified_base 17: mod_base = OTHER; note = 2'O-methyl uridine
  modified_base 18: mod_base = OTHER; note = 2'-fluoro cytidine
  modified_base 19: mod_base = OTHER; note = 2'O-methyl cytidine
  modified_base 20: mod_base = OTHER; note = 2'-fluoro adenosine
  modified_base 21: mod_base = OTHER; note = 2'O-methyl cytidine phosphorothioate
  modified_base 22: mod_base = OTHER; note = 2'O-methyl uridine phosphorothioate
  modified_base 23: mod_base = OTHER; note = 2'O-methyl uridine
ggaacataccaaggcatccactt

SEQ ID NO: 1829 - RNA, 23 nt, synthetic construct
  source 1..23: mol_type = other RNA
  modified_base 1: mod_base = OTHER; note = 5' vinyl phosphonate 2'O-methyl adenosine phosphorothioate
  modified_base 2: mod_base = OTHER; note = 2'-fluoro guanosine phosphorothioate
  modified_base 3: mod_base = OTHER; note = 2'O-methyl guanosine
  modified_base 4: mod_base = OTHER; note = 2'-fluoro adenosine
  modified_base 5: mod_base = OTHER; note = 2'O-methyl adenosine
  modified_base 6: mod_base = OTHER; note = 2'-fluoro cytidine
  modified_base 7: mod_base = OTHER; note = 2'O-methyl adenosine
  modified_base 8: mod_base = OTHER; note = 2'-fluoro uridine
  modified_base 9: mod_base = OTHER; note = 2'O-methyl adenosine
  modified_base 10: mod_base = OTHER; note = 2'-fluoro cytidine
  modified_base 11: mod_base = OTHER; note = 2'O-methyl cytidine
  modified_base 12: mod_base = OTHER; note = 2'-fluoro adenosine
  modified_base 13: mod_base = OTHER; note = 2'O-methyl adenosine
  modified_base 14: mod_base = OTHER; note = 2'-fluoro guanosine
  modified_base 15: mod_base = OTHER; note = 2'O-methyl guanosine
  modified_base 16: mod_base = OTHER; note = 2'-fluoro cytidine
  modified_base 17: mod_base = OTHER; note = 2'O-methyl adenosine
  modified_base 18: mod_base = OTHER; note = 2'-fluoro uridine
  modified_base 19: mod_base = OTHER; note = 2'O-methyl cytidine
  modified_base 20: mod_base = OTHER; note = 2'-fluoro cytidine
  modified_base 21: mod_base = OTHER; note = 2'O-methyl adenosine phosphorothioate
  modified_base 22: mod_base = OTHER; note = 2'O-methyl uridine phosphorothioate
  modified_base 23: mod_base = OTHER; note = 2'O-methyl uridine
aggaacataccaaggcatccatt

SEQ ID NO: 1830 - RNA, 23 nt, synthetic construct
  source 1..23: mol_type = other RNA
  modified_base 1: mod_base = OTHER; note = 5' vinyl phosphonate 2'O-methyl cytidine phosphorothioate
  modified_base 2: mod_base = OTHER; note = 2'-fluoro adenosine phosphorothioate
  modified_base 3: mod_base = OTHER; note = 2'O-methyl guanosine
  modified_base 4: mod_base = OTHER; note = 2'-fluoro guanosine
  modified_base 5: mod_base = OTHER; note = 2'O-methyl adenosine
  modified_base 6: mod_base = OTHER; note = 2'-fluoro adenosine
  modified_base 7: mod_base = OTHER; note = 2'O-methyl cytidine
  modified_base 8: mod_base = OTHER; note = 2'-fluoro adenosine
  modified_base 9: mod_base = OTHER; note = 2'O-methyl uridine
  modified_base 10: mod_base = OTHER; note = 2'-fluoro adenosine
  modified_base 11: mod_base = OTHER; note = 2'O-methyl cytidine
  modified_base 12: mod_base = OTHER; note = 2'-fluoro cytidine
  modified_base 13: mod_base = OTHER; note = 2'O-methyl adenosine
  modified_base 14: mod_base = OTHER; note = 2'-fluoro adenosine
  modified_base 15: mod_base = OTHER; note = 2'O-methyl guanosine
  modified_base 16: mod_base = OTHER; note = 2'-fluoro guanosine
  modified_base 17: mod_base = OTHER; note = 2'O-methyl cytidine
  modified_base 18: mod_base = OTHER; note = 2'-fluoro adenosine
  modified_base 19: mod_base = OTHER; note = 2'O-methyl uridine
  modified_base 20: mod_base = OTHER; note = 2'-fluoro cytidine
  modified_base 21: mod_base = OTHER; note = 2'O-methyl cytidine phosphorothioate
  modified_base 22: mod_base = OTHER; note = 2'O-methyl uridine phosphorothioate
  modified_base 23: mod_base = OTHER; note = 2'O-methyl uridine
caggaacataccaaggcatcctt

SEQ ID NO: 1831 - RNA, 23 nt, synthetic construct
  source 1..23: mol_type = other RNA
  modified_base 1: mod_base = OTHER; note = 5' vinyl phosphonate 2'O-methyl adenosine phosphorothioate
  modified_base 2: mod_base = OTHER; note = 2'-fluoro guanosine phosphorothioate
  modified_base 3: mod_base = OTHER; note = 2'O-methyl cytidine
  modified_base 4: mod_base = OTHER; note = 2'-fluoro adenosine
  modified_base 5: mod_base = OTHER; note = 2'O-methyl guanosine
  modified_base 6: mod_base = OTHER; note = 2'-fluoro guanosine
  modified_base 7: mod_base = OTHER; note = 2'O-methyl adenosine
  modified_base 8: mod_base = OTHER; note = 2'-fluoro adenosine
  modified_base 9: mod_base = OTHER; note = 2'O-methyl cytidine
  modified_base 10: mod_base = OTHER; note = 2'-fluoro adenosine
  modified_base 11: mod_base = OTHER; note = 2'O-methyl uridine
  modified_base 12: mod_base = OTHER; note = 2'-fluoro adenosine
  modified_base 13: mod_base = OTHER; note = 2'O-methyl cytidine
  modified_base 14: mod_base = OTHER; note = 2'-fluoro cytidine
  modified_base 15: mod_base = OTHER; note = 2'O-methyl adenosine
  modified_base 16: mod_base = OTHER; note = 2'-fluoro adenosine
  modified_base 17: mod_base = OTHER; note = 2'O-methyl guanosine
  modified_base 18: mod_base = OTHER; note = 2'-fluoro guanosine
  modified_base 19: mod_base = OTHER; note = 2'O-methyl cytidine
  modified_base 20: mod_base = OTHER; note = 2'-fluoro adenosine
  modified_base 21: mod_base = OTHER; note = 2'O-methyl uridine phosphorothioate
  modified_base 22: mod_base = OTHER; note = 2'O-methyl uridine phosphorothioate
  modified_base 23: mod_base = OTHER; note = 2'O-methyl uridine
agcaggaacataccaaggcattt

SEQ ID NO: 1832 - RNA, 23 nt, synthetic construct
  source 1..23: mol_type = other RNA
  modified_base 1: mod_base = OTHER; note = 5' vinyl phosphonate 2'O-methyl guanosine phosphorothioate
  modified_base 2: mod_base = OTHER; note = 2'-fluoro adenosine phosphorothioate
  modified_base 3: mod_base = OTHER; note = 2'O-methyl adenosine
  modified_base 4: mod_base = OTHER; note = 2'-fluoro guanosine
  modified_base 5: mod_base = OTHER; note = 2'O-methyl cytidine
  modified_base 6: mod_base = OTHER; note = 2'-fluoro adenosine
  modified_base 7: mod_base = OTHER; note = 2'O-methyl guanosine
  modified_base 8: mod_base = OTHER; note = 2'-fluoro guanosine
  modified_base 9: mod_base = OTHER; note = 2'O-methyl adenosine
  modified_base 10: mod_base = OTHER; note = 2'-fluoro adenosine
  modified_base 11: mod_base = OTHER; note = 2'O-methyl cytidine
  modified_base 12: mod_base = OTHER; note = 2'-fluoro adenosine
  modified_base 13: mod_base = OTHER; note = 2'O-methyl uridine
  modified_base 14: mod_base = OTHER; note = 2'-fluoro adenosine
  modified_base 15: mod_base = OTHER; note = 2'O-methyl cytidine
  modified_base 16: mod_base = OTHER; note = 2'-fluoro cytidine
  modified_base 17: mod_base = OTHER; note = 2'O-methyl adenosine
  modified_base 18: mod_base = OTHER; note = 2'-fluoro adenosine
  modified_base 19: mod_base = OTHER; note = 2'O-methyl guanosine
  modified_base 20: mod_base = OTHER; note = 2'-fluoro guanosine
  modified_base 21: mod_base = OTHER; note = 2'O-methyl cytidine phosphorothioate
  modified_base 22: mod_base = OTHER; note = 2'O-methyl uridine phosphorothioate
  modified_base 23: mod_base = OTHER; note = 2'O-methyl uridine
gaagcaggaacataccaaggctt

SEQ ID NO: 1833 - RNA, 23 nt, synthetic construct
  source 1..23: mol_type = other RNA
  modified_base 1: mod_base = OTHER; note = 5' vinyl phosphonate 2'O-methyl guanosine phosphorothioate
  modified_base 2: mod_base = OTHER; note = 2'-fluoro adenosine phosphorothioate
  modified_base 3: mod_base = OTHER; note = 2'O-methyl adenosine
  modified_base 4: mod_base = OTHER; note = 2'-fluoro guanosine
  modified_base 5: mod_base = OTHER; note = 2'O-methyl guanosine
  modified_base 6: mod_base = OTHER; note = 2'-fluoro guanosine
  modified_base 7: mod_base = OTHER; note = 2'O-methyl cytidine
  modified_base 8: mod_base = OTHER; note = 2'-fluoro adenosine
  modified_base 9: mod_base = OTHER; note = 2'O-methyl uridine
  modified_base 10: mod_base = OTHER; note = 2'-fluoro guanosine
  modified_base 11: mod_base = OTHER; note = 2'O-methyl adenosine
  modified_base 12: mod_base = OTHER; note = 2'-fluoro adenosine
  modified_base 13: mod_base = OTHER; note = 2'O-methyl guanosine
  modified_base 14: mod_base = OTHER; note = 2'-fluoro cytidine
  modified_base 15: mod_base = OTHER; note = 2'O-methyl adenosine
  modified_base 16: mod_base = OTHER; note = 2'-fluoro guanosine
  modified_base 17: mod_base = OTHER; note = 2'O-methyl guanosine
  modified_base 18: mod_base = OTHER; note = 2'-fluoro adenosine
  modified_base 19: mod_base = OTHER; note = 2'O-methyl adenosine
  modified_base 20: mod_base = OTHER; note = 2'-fluoro cytidine
  modified_base 21: mod_base = OTHER; note = 2'O-methyl adenosine phosphorothioate
  modified_base 22: mod_base = OTHER; note = 2'O-methyl uridine phosphorothioate
  modified_base 23: mod_base = OTHER; note = 2'O-methyl uridine
gaagggcatgaagcaggaacatt

SEQ ID NO: 1834 - RNA, 23 nt, synthetic construct
  source 1..23: mol_type = other RNA
  modified_base 1: mod_base = OTHER; note = 5' vinyl phosphonate 2'O-methyl guanosine phosphorothioate
  modified_base 2: mod_base = OTHER; note = 2'-fluoro uridine phosphorothioate
  modified_base 3: mod_base = OTHER; note = 2'O-methyl adenosine
  modified_base 4: mod_base = OTHER; note = 2'-fluoro guanosine
  modified_base 5: mod_base = OTHER; note = 2'O-methyl adenosine
  modified_base 6: mod_base = OTHER; note = 2'-fluoro adenosine
  modified_base 7: mod_base = OTHER; note = 2'O-methyl guanosine
  modified_base 8: mod_base = OTHER; note = 2'-fluoro guanosine
  modified_base 9: mod_base = OTHER; note = 2'O-methyl guanosine
  modified_base 10: mod_base = OTHER; note = 2'-fluoro cytidine
  modified_base 11: mod_base = OTHER; note = 2'O-methyl adenosine
  modified_base 12: mod_base = OTHER; note = 2'-fluoro uridine
  modified_base 13: mod_base = OTHER; note = 2'O-methyl guanosine
  modified_base 14: mod_base = OTHER; note = 2'-fluoro adenosine
  modified_base 15: mod_base = OTHER; note = 2'O-methyl adenosine
  modified_base 16: mod_base = OTHER; note = 2'-fluoro guanosine
  modified_base 17: mod_base = OTHER; note = 2'O-methyl cytidine
  modified_base 18: mod_base = OTHER; note = 2'-fluoro adenosine
  modified_base 19: mod_base = OTHER; note = 2'O-methyl guanosine
  modified_base 20: mod_base = OTHER; note = 2'-fluoro guanosine
  modified_base 21: mod_base = OTHER; note = 2'O-methyl adenosine phosphorothioate
  modified_base 22: mod_base = OTHER; note = 2'O-methyl uridine phosphorothioate
  modified_base 23: mod_base = OTHER; note = 2'O-methyl uridine
gtagaagggcatgaagcaggatt

SEQ ID NO: 1835 - RNA, 23 nt, synthetic construct
  source 1..23: mol_type = other RNA
  modified_base 1: mod_base = OTHER; note = 5' vinyl phosphonate 2'O-methyl guanosine phosphorothioate
  modified_base 2: mod_base = OTHER; note = 2'-fluoro guanosine phosphorothioate
  modified_base 3: mod_base = OTHER; note = 2'O-methyl adenosine
  modified_base 4: mod_base = OTHER; note = 2'-fluoro adenosine
  modified_base 5: mod_base = OTHER; note = 2'O-methyl guanosine
  modified_base 6: mod_base = OTHER; note = 2'-fluoro guanosine
  modified_base 7: mod_base = OTHER; note = 2'O-methyl adenosine
  modified_base 8: mod_base = OTHER; note = 2'-fluoro guanosine
  modified_base 9: mod_base = OTHER; note = 2'O-methyl guanosine
  modified_base 10: mod_base = OTHER; note = 2'-fluoro guanosine
  modified_base 11: mod_base = OTHER; note = 2'O-methyl adenosine
  modified_base 12: mod_base = OTHER; note = 2'-fluoro uridine
  modified_base 13: mod_base = OTHER; note = 2'O-methyl adenosine
  modified_base 14: mod_base = OTHER; note = 2'-fluoro adenosine
  modified_base 15: mod_base = OTHER; note = 2'O-methyl guanosine
  modified_base 16: mod_base = OTHER; note = 2'-fluoro guanosine
  modified_base 17: mod_base = OTHER; note = 2'O-methyl cytidine
  modified_base 18: mod_base = OTHER; note = 2'-fluoro cytidine
  modified_base 19: mod_base = OTHER; note = 2'O-methyl adenosine
  modified_base 20: mod_base = OTHER; note = 2'-fluoro cytidine
  modified_base 21: mod_base = OTHER; note = 2'O-methyl uridine phosphorothioate
  modified_base 22: mod_base = OTHER; note = 2'O-methyl uridine phosphorothioate
  modified_base 23: mod_base = OTHER; note = 2'O-methyl uridine
ggaaggagggataaggccacttt

SEQ ID NO: 1836 - RNA, 23 nt, synthetic construct
  source 1..23: mol_type = other RNA
  modified_base 1: mod_base = OTHER; note = 5' vinyl phosphonate 2'O-methyl guanosine phosphorothioate
  modified_base 2: mod_base = OTHER; note = 2'-fluoro adenosine phosphorothioate
  modified_base 3: mod_base = OTHER; note = 2'O-methyl adenosine
  modified_base 4: mod_base = OTHER; note = 2'-fluoro guanosine
  modified_base 5: mod_base = OTHER; note = 2'O-methyl guanosine
  modified_base 6: mod_base = OTHER; note = 2'-fluoro adenosine
  modified_base 7: mod_base = OTHER; note = 2'O-methyl adenosine
  modified_base 8: mod_base = OTHER; note = 2'-fluoro guanosine
  modified_base 9: mod_base = OTHER; note = 2'O-methyl guanosine
  modified_base 10: mod_base = OTHER; note = 2'-fluoro adenosine
  modified_base 11: mod_base = OTHER; note = 2'O-methyl guanosine
  modified_base 12: mod_base = OTHER; note = 2'-fluoro guanosine
  modified_base 13: mod_base = OTHER; note = 2'O-methyl guanosine
  modified_base 14: mod_base = OTHER; note = 2'-fluoro adenosine
  modified_base 15: mod_base = OTHER; note = 2'O-methyl uridine
  modified_base 16: mod_base = OTHER; note = 2'-fluoro adenosine
  modified_base 17: mod_base = OTHER; note = 2'O-methyl adenosine
  modified_base 18: mod_base = OTHER; note = 2'-fluoro guanosine
  modified_base 19: mod_base = OTHER; note = 2'O-methyl guanosine
  modified_base 20: mod_base = OTHER; note = 2'-fluoro cytidine
  modified_base 21: mod_base = OTHER; note = 2'O-methyl cytidine phosphorothioate
  modified_base 22: mod_base = OTHER; note = 2'O-methyl uridine phosphorothioate
  modified_base 23: mod_base = OTHER; note = 2'O-methyl uridine
gaaggaaggagggataaggcctt

SEQ ID NO: 1837 - RNA, 23 nt, synthetic construct
  source 1..23: mol_type = other RNA
  modified_base 1: mod_base = OTHER; note = 5' vinyl phosphonate 2'O-methyl cytidine phosphorothioate
  modified_base 2: mod_base = OTHER; note = 2'-fluoro uridine phosphorothioate
  modified_base 3: mod_base = OTHER; note = 2'O-methyl guanosine
  modified_base 4: mod_base = OTHER; note = 2'-fluoro adenosine
  modified_base 5: mod_base = OTHER; note = 2'O-methyl adenosine
  modified_base 6: mod_base = OTHER; note = 2'-fluoro guanosine
  modified_base 7: mod_base = OTHER; note = 2'O-methyl guanosine
  modified_base 8: mod_base = OTHER; note = 2'-fluoro adenosine
  modified_base 9: mod_base = OTHER; note = 2'O-methyl adenosine
  modified_base 10: mod_base = OTHER; note = 2'-fluoro guanosine
  modified_base 11: mod_base = OTHER; note = 2'O-methyl guanosine
  modified_base 12: mod_base = OTHER; note = 2'-fluoro adenosine
  modified_base 13: mod_base = OTHER; note = 2'O-methyl guanosine
  modified_base 14: mod_base = OTHER; note = 2'-fluoro guanosine
  modified_base 15: mod_base = OTHER; note = 2'O-methyl guanosine
  modified_base 16: mod_base = OTHER; note = 2'-fluoro adenosine
  modified_base 17: mod_base = OTHER; note = 2'O-methyl uridine
  modified_base 18: mod_base = OTHER; note = 2'-fluoro adenosine
  modified_base 19: mod_base = OTHER; note = 2'O-methyl adenosine
  modified_base 20: mod_base = OTHER; note = 2'-fluoro guanosine
  modified_base 21: mod_base = OTHER; note = 2'O-methyl guanosine phosphorothioate
  modified_base 22: mod_base = OTHER; note = 2'O-methyl uridine phosphorothioate
  modified_base 23: mod_base = OTHER; note = 2'O-methyl uridine
ctgaaggaaggagggataaggtt

SEQ ID NO: 1838 - RNA, 23 nt, synthetic construct
  source 1..23: mol_type = other RNA
  modified_base 1: mod_base = OTHER; note = 5' vinyl phosphonate 2'O-methyl uridine phosphorothioate
  modified_base 2: mod_base = OTHER; note = 2'-fluoro cytidine phosphorothioate
  modified_base 3: mod_base = OTHER; note = 2'O-methyl uridine
  modified_base 4: mod_base = OTHER; note = 2'-fluoro guanosine
  modified_base 5: mod_base = OTHER; note = 2'O-methyl adenosine
  modified_base 6: mod_base = OTHER; note = 2'-fluoro adenosine
  modified_base 7: mod_base = OTHER; note = 2'O-methyl guanosine
  modified_base 8: mod_base = OTHER; note = 2'-fluoro guanosine
  modified_base 9: mod_base = OTHER; note = 2'O-methyl adenosine
  modified_base 10: mod_base = OTHER; note = 2'-fluoro adenosine
  modified_base 11: mod_base = OTHER; note = 2'O-methyl guanosine
  modified_base 12: mod_base = OTHER; note = 2'-fluoro guanosine
  modified_base 13: mod_base = OTHER; note = 2'O-methyl adenosine
  modified_base 14: mod_base = OTHER; note = 2'-fluoro guanosine
  modified_base 15: mod_base = OTHER; note = 2'O-methyl guanosine
  modified_base 16: mod_base = OTHER; note = 2'-fluoro guanosine
  modified_base 17: mod_base = OTHER; note = 2'O-methyl adenosine
  modified_base 18: mod_base = OTHER; note = 2'-fluoro uridine
  modified_base 19: mod_base = OTHER; note = 2'O-methyl adenosine
  modified_base 20: mod_base = OTHER; note = 2'-fluoro adenosine
  modified_base 21: mod_base = OTHER; note = 2'O-methyl guanosine phosphorothioate
  modified_base 22: mod_base = OTHER; note = 2'O-methyl uridine phosphorothioate
  modified_base 23: mod_base = OTHER; note = 2'O-methyl uridine
tctgaaggaaggagggataagtt

SEQ ID NO: 1839 - RNA, 23 nt, synthetic construct
  source 1..23: mol_type = other RNA
  modified_base 1: mod_base = OTHER; note = 5' vinyl phosphonate 2'O-methyl cytidine phosphorothioate
  modified_base 2: mod_base = OTHER; note = 2'-fluoro uridine phosphorothioate
  modified_base 3: mod_base = OTHER; note = 2'O-methyl cytidine
  modified_base 4: mod_base = OTHER; note = 2'-fluoro uridine
  modified_base 5: mod_base = OTHER; note = 2'O-methyl guanosine
  modified_base 6: mod_base = OTHER; note = 2'-fluoro adenosine
  modified_base 7: mod_base = OTHER; note = 2'O-methyl adenosine
  modified_base 8: mod_base = OTHER; note = 2'-fluoro guanosine
  modified_base 9: mod_base = OTHER; note = 2'O-methyl guanosine
  modified_base 10: mod_base = OTHER; note = 2'-fluoro adenosine
  modified_base 11: mod_base = OTHER; note = 2'O-methyl adenosine
  modified_base 12: mod_base = OTHER; note = 2'-fluoro guanosine
  modified_base 13: mod_base = OTHER; note = 2'O-methyl guanosine
  modified_base 14: mod_base = OTHER; note = 2'-fluoro adenosine
  modified_base 15: mod_base = OTHER; note = 2'O-methyl guanosine
  modified_base 16: mod_base = OTHER; note = 2'-fluoro guanosine
  modified_base 17: mod_base = OTHER; note = 2'O-methyl guanosine
  modified_base 18: mod_base = OTHER; note = 2'-fluoro adenosine
  modified_base 19: mod_base = OTHER; note = 2'O-methyl uridine
  modified_base 20: mod_base = OTHER; note = 2'-fluoro adenosine
  modified_base 21: mod_base = OTHER; note = 2'O-methyl adenosine phosphorothioate
  modified_base 22: mod_base = OTHER; note = 2'O-methyl uridine phosphorothioate
  modified_base 23: mod_base = OTHER; note = 2'O-methyl uridine
ctctgaaggaaggagggataatt

SEQ ID NO: 1840 - RNA, 23 nt, synthetic construct
  source 1..23: mol_type = other RNA
  modified_base 1: mod_base = OTHER; note = 5' vinyl phosphonate 2'O-methyl adenosine phosphorothioate
  modified_base 2: mod_base = OTHER; note = 2'-fluoro cytidine phosphorothioate
  modified_base 3: mod_base = OTHER; note = 2'O-methyl guanosine
  modified_base 4: mod_base = OTHER; note = 2'-fluoro cytidine
  modified_base 5: mod_base = OTHER; note = 2'O-methyl cytidine
  modified_base 6: mod_base = OTHER; note = 2'-fluoro uridine
  modified_base 7: mod_base = OTHER; note = 2'O-methyl cytidine
  modified_base 8: mod_base = OTHER; note = 2'-fluoro uridine
  modified_base 9: mod_base = OTHER; note = 2'O-methyl guanosine
  modified_base 10: mod_base = OTHER; note = 2'-fluoro adenosine
  modified_base 11: mod_base = OTHER; note = 2'O-methyl adenosine
  modified_base 12: mod_base = OTHER; note = 2'-fluoro guanosine
  modified_base 13: mod_base = OTHER; note = 2'O-methyl guanosine
  modified_base 14: mod_base = OTHER; note = 2'-fluoro adenosine
  modified_base 15: mod_base = OTHER; note = 2'O-methyl adenosine
  modified_base 16: mod_base = OTHER; note = 2'-fluoro guanosine
  modified_base 17: mod_base = OTHER; note = 2'O-methyl guanosine
  modified_base 18: mod_base = OTHER; note = 2'-fluoro adenosine
  modified_base 19: mod_base = OTHER; note = 2'O-methyl guanosine
  modified_base 20: mod_base = OTHER; note = 2'-fluoro guanosine
  modified_base 21: mod_base = OTHER; note = 2'O-methyl guanosine phosphorothioate
  modified_base 22: mod_base = OTHER; note = 2'O-methyl uridine phosphorothioate
  modified_base 23: mod_base = OTHER; note = 2'O-methyl uridine
acgcctctgaaggaaggagggtt

SEQ ID NO: 1841 - RNA, 23 nt, synthetic construct
  source 1..23: mol_type = other RNA
  modified_base 1: mod_base = OTHER; note = 5' vinyl phosphonate 2'O-methyl cytidine phosphorothioate
  modified_base 2: mod_base = OTHER; note = 2'-fluoro adenosine phosphorothioate
  modified_base 3: mod_base = OTHER; note = 2'O-methyl cytidine
  modified_base 4: mod_base = OTHER; note = 2'-fluoro guanosine
  modified_base 5: mod_base = OTHER; note = 2'O-methyl cytidine
  modified_base 6: mod_base = OTHER; note = 2'-fluoro cytidine
  modified_base 7: mod_base = OTHER; note = 2'O-methyl uridine
  modified_base 8: mod_base = OTHER; note = 2'-fluoro cytidine
  modified_base 9: mod_base = OTHER; note = 2'O-methyl uridine
  modified_base 10: mod_base = OTHER; note = 2'-fluoro guanosine
  modified_base 11: mod_base = OTHER; note = 2'O-methyl adenosine
  modified_base 12: mod_base = OTHER; note = 2'-fluoro adenosine
  modified_base 13: mod_base = OTHER; note = 2'O-methyl guanosine
  modified_base 14: mod_base = OTHER; note = 2'-fluoro guanosine
  modified_base 15: mod_base = OTHER; note = 2'O-methyl adenosine
  modified_base 16: mod_base = OTHER; note = 2'-fluoro adenosine
  modified_base 17: mod_base = OTHER; note = 2'O-methyl guanosine
  modified_base 18: mod_base = OTHER; note = 2'-fluoro guanosine
  modified_base 19: mod_base = OTHER; note = 2'O-methyl adenosine
  modified_base 20: mod_base = OTHER; note = 2'-fluoro guanosine
  modified_base 21: mod_base = OTHER; note = 2'O-methyl guanosine phosphorothioate
  modified_base 22: mod_base = OTHER; note = 2'O-methyl uridine phosphorothioate
  modified_base 23: mod_base = OTHER; note = 2'O-methyl uridine
cacgcctctgaaggaaggaggtt

SEQ ID NO: 1842 - RNA, 23 nt, synthetic construct
  source 1..23: mol_type = other RNA
  modified_base 1: mod_base = OTHER; note = 5' vinyl phosphonate 2'O-methyl guanosine phosphorothioate
  modified_base 2: mod_base = OTHER; note = 2'-fluoro cytidine phosphorothioate
  modified_base 3: mod_base = OTHER; note = 2'O-methyl adenosine
  modified_base 4: mod_base = OTHER; note = 2'-fluoro cytidine
  modified_base 5: mod_base = OTHER; note = 2'O-methyl guanosine
  modified_base 6: mod_base = OTHER; note = 2'-fluoro cytidine
  modified_base 7: mod_base = OTHER; note = 2'O-methyl cytidine
  modified_base 8: mod_base = OTHER; note = 2'-fluoro uridine
  modified_base 9: mod_base = OTHER; note = 2'O-methyl cytidine
  modified_base 10: mod_base = OTHER; note = 2'-fluoro uridine
  modified_base 11: mod_base = OTHER; note = 2'O-methyl guanosine
  modified_base 12: mod_base = OTHER; note = 2'-fluoro adenosine
  modified_base 13: mod_base = OTHER; note = 2'O-methyl adenosine
  modified_base 14: mod_base = OTHER; note = 2'-fluoro guanosine
  modified_base 15: mod_base = OTHER; note = 2'O-methyl guanosine
  modified_base 16: mod_base = OTHER; note = 2'-fluoro adenosine
  modified_base 17: mod_base = OTHER; note = 2'O-methyl adenosine
  modified_base 18: mod_base = OTHER; note = 2'-fluoro guanosine
  modified_base 19: mod_base = OTHER; note = 2'O-methyl guanosine
  modified_base 20: mod_base = OTHER; note = 2'-fluoro adenosine
  modified_base 21: mod_base = OTHER; note = 2'O-methyl guanosine phosphorothioate
  modified_base 22: mod_base = OTHER; note = 2'O-methyl uridine phosphorothioate
  modified_base 23: mod_base = OTHER; note = 2'O-methyl uridine
gcacgcctctgaaggaaggagtt

SEQ ID NO: 1843 - RNA, 23 nt, synthetic construct
  source 1..23: mol_type = other RNA
  modified_base 1: mod_base = OTHER; note = 5' vinyl phosphonate 2'O-methyl uridine phosphorothioate
  modified_base 2: mod_base = OTHER; note = 2'-fluoro cytidine phosphorothioate
  modified_base 3: mod_base = OTHER; note = 2'O-methyl guanosine
  modified_base 4: mod_base = OTHER; note = 2'-fluoro cytidine
  modified_base 5: mod_base = OTHER; note = 2'O-methyl adenosine
  modified_base 6: mod_base = OTHER; note = 2'-fluoro cytidine
  modified_base 7: mod_base = OTHER; note = 2'O-methyl guanosine
  modified_base 8: mod_base = OTHER; note = 2'-fluoro cytidine
  modified_base 9: mod_base = OTHER; note = 2'O-methyl cytidine
  modified_base 10: mod_base = OTHER; note = 2'-fluoro uridine
  modified_base 11: mod_base = OTHER; note = 2'O-methyl cytidine
  modified_base 12: mod_base = OTHER; note = 2'-fluoro uridine
  modified_base 13: mod_base = OTHER; note = 2'O-methyl guanosine
  modified_base 14: mod_base = OTHER; note = 2'-fluoro adenosine
  modified_base 15: mod_base = OTHER; note = 2'O-methyl adenosine
  modified_base 16: mod_base = OTHER; note = 2'-fluoro guanosine
  modified_base 17: mod_base = OTHER; note = 2'O-methyl guanosine
  modified_base 18: mod_base = OTHER; note = 2'-fluoro adenosine
  modified_base 19: mod_base = OTHER; note = 2'O-methyl adenosine
  modified_base 20: mod_base = OTHER; note = 2'-fluoro guanosine
  modified_base 21: mod_base = OTHER; note = 2'O-methyl guanosine phosphorothioate
  modified_base 22: mod_base = OTHER; note = 2'O-methyl uridine phosphorothioate
  modified_base 23: mod_base = OTHER; note = 2'O-methyl uridine
tcgcacgcctctgaaggaaggtt

SEQ ID NO: 1844 - RNA, 23 nt, synthetic construct
  source 1..23: mol_type = other RNA
  modified_base 1: mod_base = OTHER; note = 5' vinyl phosphonate 2'O-methyl adenosine phosphorothioate
  modified_base 2: mod_base = OTHER; note = 2'-fluoro uridine phosphorothioate
  modified_base 3: mod_base = OTHER; note = 2'O-methyl cytidine
  modified_base 4: mod_base = OTHER; note = 2'-fluoro guanosine
  modified_base 5: mod_base = OTHER; note = 2'O-methyl cytidine
  modified_base 6: mod_base = OTHER; note = 2'-fluoro adenosine
  modified_base 7: mod_base = OTHER; note = 2'O-methyl cytidine
  modified_base 8: mod_base = OTHER; note = 2'-fluoro guanosine
  modified_base 9: mod_base = OTHER; note = 2'O-methyl cytidine
  modified_base 10: mod_base = OTHER; note = 2'-fluoro cytidine
  modified_base 11: mod_base = OTHER; note = 2'O-methyl uridine
  modified_base 12: mod_base = OTHER; note = 2'-fluoro cytidine
  modified_base 13: mod_base = OTHER; note = 2'O-methyl uridine
  modified_base 14: mod_base = OTHER; note = 2'-fluoro guanosine
  modified_base 15: mod_base = OTHER; note = 2'O-methyl adenosine
  modified_base 16: mod_base = OTHER; note = 2'-fluoro adenosine
  modified_base 17: mod_base = OTHER; note = 2'O-methyl guanosine
  modified_base 18: mod_base = OTHER; note = 2'-fluoro guanosine
  modified_base 19: mod_base = OTHER; note = 2'O-methyl adenosine
  modified_base 20: mod_base = OTHER; note = 2'-fluoro adenosine
  modified_base 21: mod_base = OTHER; note = 2'O-methyl guanosine phosphorothioate
  modified_base 22: mod_base = OTHER; note = 2'O-methyl uridine phosphorothioate
  modified_base 23: mod_base = OTHER; note = 2'O-methyl uridine
atcgcacgcctctgaaggaagtt

SEQ ID NO: 1845 - RNA, 23 nt, synthetic construct
  source 1..23: mol_type = other RNA
  modified_base 1: mod_base = OTHER; note = 5' vinyl phosphonate 2'O-methyl uridine phosphorothioate
  modified_base 2: mod_base = OTHER; note = 2'-fluoro adenosine phosphorothioate
  modified_base 3: mod_base = OTHER; note = 2'O-methyl uridine
  modified_base 4: mod_base = OTHER; note = 2'-fluoro cytidine
  modified_base 5: mod_base = OTHER; note = 2'O-methyl guanosine
  modified_base 6: mod_base = OTHER; note = 2'-fluoro cytidine
  modified_base 7: mod_base = OTHER; note = 2'O-methyl adenosine
  modified_base 8: mod_base = OTHER; note = 2'-fluoro cytidine
  modified_base 9: mod_base = OTHER; note = 2'O-methyl guanosine
  modified_base 10: mod_base = OTHER; note = 2'-fluoro cytidine
  modified_base 11: mod_base = OTHER; note = 2'O-methyl cytidine
  modified_base 12: mod_base = OTHER; note = 2'-fluoro uridine
  modified_base 13: mod_base = OTHER; note = 2'O-methyl cytidine
  modified_base 14: mod_base = OTHER; note = 2'-fluoro uridine
  modified_base 15: mod_base = OTHER; note = 2'O-methyl guanosine
  modified_base 16: mod_base = OTHER; note = 2'-fluoro adenosine
  modified_base 17: mod_base = OTHER; note = 2'O-methyl adenosine
  modified_base 18: mod_base = OTHER; note = 2'-fluoro guanosine
  modified_base 19: mod_base = OTHER; note = 2'O-methyl guanosine
  modified_base 20: mod_base = OTHER; note = 2'-fluoro adenosine
  modified_base 21: mod_base = OTHER; note = 2'O-methyl adenosine phosphorothioate
  modified_base 22: mod_base = OTHER; note = 2'O-methyl uridine phosphorothioate
  modified_base 23: mod_base = OTHER; note = 2'O-methyl uridine
tatcgcacgcctctgaaggaatt

SEQ ID NO: 1846 - RNA, 23 nt, synthetic construct
  source 1..23: mol_type = other RNA
  modified_base 1: mod_base = OTHER; note = 5' vinyl phosphonate 2'O-methyl cytidine phosphorothioate
  modified_base 2: mod_base = OTHER; note = 2'-fluoro uridine phosphorothioate
  modified_base 3: mod_base = OTHER; note = 2'O-methyl cytidine
  modified_base 4: mod_base = OTHER; note = 2'-fluoro adenosine
  modified_base 5: mod_base = OTHER; note = 2'O-methyl cytidine
  modified_base 6: mod_base = OTHER; note = 2'-fluoro uridine
  modified_base 7: mod_base = OTHER; note = 2'O-methyl cytidine
  modified_base 8: mod_base = OTHER; note = 2'-fluoro cytidine
  modified_base 9: mod_base = OTHER; note = 2'O-methyl uridine
  modified_base 10: mod_base = OTHER; note = 2'-fluoro cytidine
  modified_base 11: mod_base = OTHER; note = 2'O-methyl cytidine
  modified_base 12: mod_base = OTHER; note = 2'-fluoro adenosine
  modified_base 13: mod_base = OTHER; note = 2'O-methyl uridine
  modified_base 14: mod_base = OTHER; note = 2'-fluoro cytidine
  modified_base 15: mod_base = OTHER; note = 2'O-methyl cytidine
  modified_base 16: mod_base = OTHER; note = 2'-fluoro adenosine
  modified_base 17: mod_base = OTHER; note = 2'O-methyl cytidine
  modified_base 18: mod_base = OTHER; note = 2'-fluoro adenosine
  modified_base 19: mod_base = OTHER; note = 2'O-methyl uridine
  modified_base 20: mod_base = OTHER; note = 2'-fluoro adenosine
  modified_base 21: mod_base = OTHER; note = 2'O-methyl uridine phosphorothioate
  modified_base 22: mod_base = OTHER; note = 2'O-methyl uridine phosphorothioate
  modified_base 23: mod_base = OTHER; note = 2'O-methyl uridine
ctcactcctccatccacatattt

SEQ ID NO: 1847 - RNA, 23 nt, synthetic construct
  source 1..23: mol_type = other RNA
  modified_base 1: mod_base = OTHER; note = 5' vinyl phosphonate 2'O-methyl uridine phosphorothioate
  modified_base 2: mod_base = OTHER; note = 2'-fluoro adenosine phosphorothioate
  modified_base 3: mod_base = OTHER; note = 2'O-methyl cytidine
  modified_base 4: mod_base = OTHER; note = 2'-fluoro guanosine
  modified_base 5: mod_base = OTHER; note = 2'O-methyl uridine
  modified_base 6: mod_base = OTHER; note = 2'-fluoro uridine
  modified_base 7: mod_base = OTHER; note = 2'O-methyl guanosine
  modified_base 8: mod_base = OTHER; note = 2'-fluoro uridine
  modified_base 9: mod_base = OTHER; note = 2'O-methyl cytidine
  modified_base 10: mod_base = OTHER; note = 2'-fluoro adenosine
  modified_base 11: mod_base = OTHER; note = 2'O-methyl cytidine
  modified_base 12: mod_base = OTHER; note = 2'-fluoro uridine
  modified_base 13: mod_base = OTHER; note = 2'O-methyl cytidine
  modified_base 14: mod_base = OTHER; note = 2'-fluoro adenosine
  modified_base 15: mod_base = OTHER; note = 2'O-methyl cytidine
  modified_base 16: mod_base = OTHER; note = 2'-fluoro uridine
  modified_base 17: mod_base = OTHER; note = 2'O-methyl cytidine
  modified_base 18: mod_base = OTHER; note = 2'-fluoro cytidine
  modified_base 19: mod_base = OTHER; note = 2'O-methyl uridine
  modified_base 20: mod_base = OTHER; note = 2'-fluoro cytidine
  modified_base 21: mod_base = OTHER; note = 2'O-methyl cytidine phosphorothioate
  modified_base 22: mod_base = OTHER; note = 2'O-methyl uridine phosphorothioate
  modified_base 23: mod_base = OTHER; note = 2'O-methyl uridine
tacgttgtcactcactcctcctt

SEQ ID NO: 1848 - RNA, 23 nt, synthetic construct
  source 1..23: mol_type = other RNA
  modified_base 1: mod_base = OTHER; note = 5' vinyl phosphonate 2'O-methyl guanosine phosphorothioate
  modified_base 2: mod_base = OTHER; note = 2'-fluoro guanosine phosphorothioate
  modified_base 3: mod_base = OTHER; note = 2'O-methyl uridine
  modified_base 4: mod_base = OTHER; note = 2'-fluoro adenosine
  modified_base 5: mod_base = OTHER; note = 2'O-methyl cytidine
  modified_base 6: mod_base = OTHER; note = 2'-fluoro guanosine
  modified_base 7: mod_base = OTHER; note = 2'O-methyl uridine
  modified_base 8: mod_base = OTHER; note = 2'-fluoro uridine
  modified_base 9: mod_base = OTHER; note = 2'O-methyl guanosine
  modified_base 10: mod_base = OTHER; note = 2'-fluoro uridine
  modified_base 11: mod_base = OTHER; note = 2'O-methyl cytidine
  modified_base 12: mod_base = OTHER; note = 2'-fluoro adenosine
  modified_base 13: mod_base = OTHER; note = 2'O-methyl cytidine
  modified_base 14: mod_base = OTHER; note = 2'-fluoro uridine
  modified_base 15: mod_base = OTHER; note = 2'O-methyl cytidine
  modified_base 16: mod_base = OTHER; note = 2'-fluoro adenosine
  modified_base 17: mod_base = OTHER; note = 2'O-methyl cytidine
  modified_base 18: mod_base = OTHER; note = 2'-fluoro uridine
  modified_base 19: mod_base = OTHER; note = 2'O-methyl cytidine
  modified_base 20: mod_base = OTHER; note = 2'-fluoro cytidine
  modified_base 21: mod_base = OTHER; note = 2'O-methyl uridine phosphorothioate
  modified_base 22: mod_base = OTHER; note = 2'O-methyl uridine phosphorothioate
  modified_base 23: mod_base = OTHER; note = 2'O-methyl uridine
ggtacgttgtcactcactccttt

SEQ ID NO: 1849 - RNA, 23 nt, synthetic construct
  source 1..23: mol_type = other RNA
  modified_base 1: mod_base = OTHER; note = 5' vinyl phosphonate 2'O-methyl guanosine phosphorothioate
  modified_base 2: mod_base = OTHER; note = 2'-fluoro guanosine phosphorothioate
  modified_base 3: mod_base = OTHER; note = 2'O-methyl guanosine
  modified_base 4: mod_base = OTHER; note = 2'-fluoro uridine
  modified_base 5: mod_base = OTHER; note = 2'O-methyl adenosine
  modified_base 6: mod_base = OTHER; note = 2'-fluoro cytidine
  modified_base 7: mod_base = OTHER; note = 2'O-methyl guanosine
  modified_base 8: mod_base = OTHER; note = 2'-fluoro uridine
  modified_base 9: mod_base = OTHER; note = 2'O-methyl uridine
  modified_base 10: mod_base = OTHER; note = 2'-fluoro guanosine
  modified_base 11: mod_base = OTHER; note = 2'O-methyl uridine
  modified_base 12: mod_base = OTHER; note = 2'-fluoro cytidine
  modified_base 13: mod_base = OTHER; note = 2'O-methyl adenosine
  modified_base 14: mod_base = OTHER; note = 2'-fluoro cytidine
  modified_base 15: mod_base = OTHER; note = 2'O-methyl uridine
  modified_base 16: mod_base = OTHER; note = 2'-fluoro cytidine
  modified_base 17: mod_base = OTHER; note = 2'O-methyl adenosine
  modified_base 18: mod_base = OTHER; note = 2'-fluoro cytidine
  modified_base 19: mod_base = OTHER; note = 2'O-methyl uridine
  modified_base 20: mod_base = OTHER; note = 2'-fluoro cytidine
  modified_base 21: mod_base = OTHER; note = 2'O-methyl cytidine phosphorothioate
  modified_base 22: mod_base = OTHER; note = 2'O-methyl uridine phosphorothioate
  modified_base 23: mod_base = OTHER; note = 2'O-methyl uridine
gggtacgttgtcactcactcctt

SEQ ID NO: 1850 - RNA, 23 nt, synthetic construct
  source 1..23: mol_type = other RNA
  modified_base 1: mod_base = OTHER; note = 5' vinyl phosphonate 2'O-methyl guanosine phosphorothioate
  modified_base 2: mod_base = OTHER; note = 2'-fluoro adenosine phosphorothioate
  modified_base 3: mod_base = OTHER; note = 2'O-methyl adenosine
  modified_base 4: mod_base = OTHER; note = 2'-fluoro guanosine
  modified_base 5: mod_base = OTHER; note = 2'O-methyl guanosine
  modified_base 6: mod_base = OTHER; note = 2'-fluoro guanosine
  modified_base 7: mod_base = OTHER; note = 2'O-methyl uridine
  modified_base 8: mod_base = OTHER; note = 2'-fluoro adenosine
  modified_base 9: mod_base = OTHER; note = 2'O-methyl cytidine
  modified_base 10: mod_base = OTHER; note = 2'-fluoro guanosine
  modified_base 11: mod_base = OTHER; note = 2'O-methyl uridine
  modified_base 12: mod_base = OTHER; note = 2'-fluoro uridine
  modified_base 13: mod_base = OTHER; note = 2'O-methyl guanosine
  modified_base 14: mod_base = OTHER; note = 2'-fluoro uridine
  modified_base 15: mod_base = OTHER; note = 2'O-methyl cytidine
  modified_base 16: mod_base = OTHER; note = 2'-fluoro adenosine
  modified_base 17: mod_base = OTHER; note = 2'O-methyl cytidine
  modified_base 18: mod_base = OTHER; note = 2'-fluoro uridine
  modified_base 19: mod_base = OTHER; note = 2'O-methyl cytidine
  modified_base 20: mod_base = OTHER; note = 2'-fluoro adenosine
  modified_base 21: mod_base = OTHER; note = 2'O-methyl cytidine phosphorothioate
  modified_base 22: mod_base = OTHER; note = 2'O-methyl uridine phosphorothioate
  modified_base 23: mod_base = OTHER; note = 2'O-methyl uridine
gaagggtacgttgtcactcactt

SEQ ID NO: 1851 - RNA, 23 nt, synthetic construct
  source 1..23: mol_type = other RNA
  modified_base 1: mod_base = OTHER; note = 5' vinyl phosphonate 2'O-methyl guanosine phosphorothioate
  modified_base 2: mod_base = OTHER; note = 2'-fluoro uridine phosphorothioate
  modified_base 3: mod_base = OTHER; note = 2'O-methyl guanosine
  modified_base 4: mod_base = OTHER; note = 2'-fluoro adenosine
  modified_base 5: mod_base = OTHER; note = 2'O-methyl uridine
  modified_base 6: mod_base = OTHER; note = 2'-fluoro guanosine
  modified_base 7: mod_base = OTHER; note = 2'O-methyl guanosine
  modified_base 8: mod_base = OTHER; note = 2'-fluoro uridine
  modified_base 9: mod_base = OTHER; note = 2'O-methyl uridine
  modified_base 10: mod_base = OTHER; note = 2'-fluoro guanosine
  modified_base 11: mod_base = OTHER; note = 2'O-methyl uridine
  modified_base 12: mod_base = OTHER; note = 2'-fluoro uridine
  modified_base 13: mod_base = OTHER; note = 2'O-methyl uridine
  modified_base 14: mod_base = OTHER; note = 2'-fluoro uridine
  modified_base 15: mod_base = OTHER; note = 2'O-methyl guanosine
  modified_base 16: mod_base = OTHER; note = 2'-fluoro guanosine
  modified_base 17: mod_base = OTHER; note = 2'O-methyl cytidine
  modified_base 18: mod_base = OTHER; note = 2'-fluoro adenosine
  modified_base 19: mod_base = OTHER; note = 2'O-methyl uridine
  modified_base 20: mod_base = OTHER; note = 2'-fluoro cytidine
  modified_base 21: mod_base = OTHER; note = 2'O-methyl adenosine phosphorothioate
  modified_base 22: mod_base = OTHER; note = 2'O-methyl uridine phosphorothioate
  modified_base 23: mod_base = OTHER; note = 2'O-methyl uridine
gtgatggttgttttggcatcatt

SEQ ID NO: 1852 - RNA, 23 nt, synthetic construct
  source 1..23: mol_type = other RNA
  modified_base 1: mod_base = OTHER; note = 5' vinyl phosphonate 2'O-methyl guanosine phosphorothioate
  modified_base 2: mod_base = OTHER; note = 2'-fluoro guanosine phosphorothioate
  modified_base 3: mod_base = OTHER; note = 2'O-methyl uridine
  modified_base 4: mod_base = OTHER; note = 2'-fluoro guanosine
  modified_base 5: mod_base = OTHER; note = 2'O-methyl adenosine
  modified_base 6: mod_base = OTHER; note = 2'-fluoro uridine
  modified_base 7: mod_base = OTHER; note = 2'O-methyl guanosine
  modified_base 8: mod_base = OTHER; note = 2'-fluoro guanosine
  modified_base 9: mod_base = OTHER; note = 2'O-methyl uridine
  modified_base 10: mod_base = OTHER; note = 2'-fluoro uridine
  modified_base 11: mod_base = OTHER; note = 2'O-methyl guanosine
  modified_base 12: mod_base = OTHER; note = 2'-fluoro uridine
  modified_base 13: mod_base = OTHER; note = 2'O-methyl uridine
  modified_base 14: mod_base = OTHER; note = 2'-fluoro uridine
  modified_base 15: mod_base = OTHER; note = 2'O-methyl uridine
  modified_base 16: mod_base = OTHER; note = 2'-fluoro guanosine
  modified_base 17: mod_base = OTHER; note = 2'O-methyl guanosine
  modified_base 18: mod_base = OTHER; note = 2'-fluoro cytidine
  modified_base 19: mod_base = OTHER; note = 2'O-methyl adenosine
  modified_base 20: mod_base = OTHER; note = 2'-fluoro uridine
  modified_base 21: mod_base = OTHER; note = 2'O-methyl cytidine phosphorothioate
  modified_base 22: mod_base = OTHER; note = 2'O-methyl uridine phosphorothioate
  modified_base 23: mod_base = OTHER; note = 2'O-methyl uridine
ggtgatggttgttttggcatctt

SEQ ID NO: 1853 - RNA, 23 nt, synthetic construct
  source 1..23: mol_type = other RNA
  modified_base 1: mod_base = OTHER; note = 5' vinyl phosphonate 2'O-methyl cytidine phosphorothioate
  modified_base 2: mod_base = OTHER; note = 2'-fluoro guanosine phosphorothioate
  modified_base 3: mod_base = OTHER; note = 2'O-methyl guanosine
  modified_base 4: mod_base = OTHER; note = 2'-fluoro uridine
  modified_base 5: mod_base = OTHER; note = 2'O-methyl guanosine
  modified_base 6: mod_base = OTHER; note = 2'-fluoro adenosine
  modified_base 7: mod_base = OTHER; note = 2'O-methyl uridine
  modified_base 8: mod_base = OTHER; note = 2'-fluoro guanosine
  modified_base 9: mod_base = OTHER; note = 2'O-methyl guanosine
  modified_base 10: mod_base = OTHER; note = 2'-fluoro uridine
  modified_base 11: mod_base = OTHER; note = 2'O-methyl uridine
  modified_base 12: mod_base = OTHER; note = 2'-fluoro guanosine
  modified_base 13: mod_base = OTHER; note = 2'O-methyl uridine
  modified_base 14: mod_base = OTHER; note = 2'-fluoro uridine
  modified_base 15: mod_base = OTHER; note = 2'O-methyl uridine
  modified_base 16: mod_base = OTHER; note = 2'-fluoro uridine
  modified_base 17: mod_base = OTHER; note = 2'O-methyl guanosine
  modified_base 18: mod_base = OTHER; note = 2'-fluoro guanosine
  modified_base 19: mod_base = OTHER; note = 2'O-methyl cytidine
  modified_base 20: mod_base = OTHER; note = 2'-fluoro adenosine
  modified_base 21: mod_base = OTHER; note = 2'O-methyl uridine phosphorothioate
  modified_base 22: mod_base = OTHER; note = 2'O-methyl uridine phosphorothioate
  modified_base 23: mod_base = OTHER; note = 2'O-methyl uridine
cggtgatggttgttttggcattt

SEQ ID NO: 1854 - RNA, 23 nt, synthetic construct
  source 1..23: mol_type = other RNA
  modified_base 1: mod_base = OTHER; note = 5' vinyl phosphonate 2'O-methyl adenosine phosphorothioate
  modified_base 2: mod_base = OTHER; note = 2'-fluoro cytidine phosphorothioate
  modified_base 3: mod_base = OTHER; note = 2'O-methyl adenosine
  modified_base 4: mod_base = OTHER; note = 2'-fluoro cytidine
  modified_base 5: mod_base = OTHER; note = 2'O-methyl guanosine
  modified_base 6: mod_base = OTHER; note = 2'-fluoro guanosine
  modified_base 7: mod_base = OTHER; note = 2'O-methyl uridine
  modified_base 8: mod_base = OTHER; note = 2'-fluoro guanosine
  modified_base 9: mod_base = OTHER; note = 2'O-methyl adenosine
  modified_base 10: mod_base = OTHER; note = 2'-fluoro uridine
  modified_base 11: mod_base = OTHER; note = 2'O-methyl guanosine
  modified_base 12: mod_base = OTHER; note = 2'-fluoro guanosine
  modified_base 13: mod_base = OTHER; note = 2'O-methyl uridine
  modified_base 14: mod_base = OTHER; note = 2'-fluoro uridine
  modified_base 15: mod_base = OTHER; note = 2'O-methyl guanosine
  modified_base 16: mod_base = OTHER; note = 2'-fluoro uridine
  modified_base 17: mod_base = OTHER; note = 2'O-methyl uridine
  modified_base 18: mod_base = OTHER; note = 2'-fluoro uridine
  modified_base 19: mod_base = OTHER; note = 2'O-methyl uridine
  modified_base 20: mod_base = OTHER; note = 2'-fluoro guanosine
  modified_base 21: mod_base = OTHER; note = 2'O-methyl guanosine phosphorothioate
  modified_base 22: mod_base = OTHER; note = 2'O-methyl uridine phosphorothioate
  modified_base 23: mod_base = OTHER; note = 2'O-methyl uridine
acacggtgatggttgttttggtt

SEQ ID NO: 1855 - RNA, 23 nt, synthetic construct
  source 1..23: mol_type = other RNA
  modified_base 1: mod_base = OTHER; note = 5' vinyl phosphonate 2'O-methyl guanosine phosphorothioate
  modified_base 2: mod_base = OTHER; note = 2'-fluoro adenosine phosphorothioate
  modified_base 3: mod_base = OTHER; note = 2'O-methyl cytidine
  modified_base 4: mod_base = OTHER; note = 2'-fluoro adenosine
  modified_base 5: mod_base = OTHER; note = 2'O-methyl cytidine
  modified_base 6: mod_base = OTHER; note = 2'-fluoro guanosine
  modified_base 7: mod_base = OTHER; note = 2'O-methyl guanosine
  modified_base 8: mod_base = OTHER; note = 2'-fluoro uridine
  modified_base 9: mod_base = OTHER; note = 2'O-methyl guanosine
  modified_base 10: mod_base = OTHER; note = 2'-fluoro adenosine
  modified_base 11: mod_base = OTHER; note = 2'O-methyl uridine
  modified_base 12: mod_base = OTHER; note = 2'-fluoro guanosine
  modified_base 13: mod_base = OTHER; note = 2'O-methyl guanosine
  modified_base 14: mod_base = OTHER; note = 2'-fluoro uridine
  modified_base 15: mod_base = OTHER; note = 2'O-methyl uridine
  modified_base 16: mod_base = OTHER; note = 2'-fluoro guanosine
  modified_base 17: mod_base = OTHER; note = 2'O-methyl uridine
  modified_base 18: mod_base = OTHER; note = 2'-fluoro uridine
  modified_base 19: mod_base = OTHER; note = 2'O-methyl uridine
  modified_base 20: mod_base = OTHER; note = 2'-fluoro uridine
  modified_base 21: mod_base = OTHER; note = 2'O-methyl guanosine phosphorothioate
  modified_base 22: mod_base = OTHER; note = 2'O-methyl uridine phosphorothioate
  modified_base 23: mod_base = OTHER; note = 2'O-methyl uridine
gacacggtgatggttgttttgtt

SEQ ID NO: 1856 - RNA, 23 nt, synthetic construct
  source 1..23: mol_type = other RNA
  modified_base 1: mod_base = OTHER; note = 5' vinyl phosphonate 2'O-methyl guanosine phosphorothioate
  modified_base 2: mod_base = OTHER; note = 2'-fluoro guanosine phosphorothioate
  modified_base 3: mod_base = OTHER; note = 2'O-methyl guanosine
  modified_base 4: mod_base = OTHER; note = 2'-fluoro adenosine
  modified_base 5: mod_base = OTHER; note = 2'O-methyl cytidine
  modified_base 6: mod_base = OTHER; note = 2'-fluoro adenosine
  modified_base 7: mod_base = OTHER; note = 2'O-methyl cytidine
  modified_base 8: mod_base = OTHER; note = 2'-fluoro guanosine
  modified_base 9: mod_base = OTHER; note = 2'O-methyl guanosine
  modified_base 10: mod_base = OTHER; note = 2'-fluoro uridine
  modified_base 11: mod_base = OTHER; note = 2'O-methyl guanosine
  modified_base 12: mod_base = OTHER; note = 2'-fluoro adenosine
  modified_base 13: mod_base = OTHER; note = 2'O-methyl uridine
  modified_base 14: mod_base = OTHER; note = 2'-fluoro guanosine
  modified_base 15: mod_base = OTHER; note = 2'O-methyl guanosine
  modified_base 16: mod_base = OTHER; note = 2'-fluoro uridine
  modified_base 17: mod_base = OTHER; note = 2'O-methyl uridine
  modified_base 18: mod_base = OTHER; note = 2'-fluoro guanosine
  modified_base 19: mod_base = OTHER; note = 2'O-methyl uridine
  modified_base 20: mod_base = OTHER; note = 2'-fluoro uridine
  modified_base 21: mod_base = OTHER; note = 2'O-methyl uridine phosphorothioate
  modified_base 22: mod_base = OTHER; note = 2'O-methyl uridine phosphorothioate
  modified_base 23: mod_base = OTHER; note = 2'O-methyl uridine
gggacacggtgatggttgttttt

SEQ ID NO: 1857 - RNA, 23 nt, synthetic construct
  source 1..23: mol_type = other RNA
  modified_base 1: mod_base = OTHER; note = 5' vinyl phosphonate 2'O-methyl guanosine phosphorothioate
  modified_base 2: mod_base = OTHER; note = 2'-fluoro guanosine phosphorothioate
  modified_base 3: mod_base = OTHER; note = 2'O-methyl guanosine
  modified_base 4: mod_base = OTHER; note = 2'-fluoro guanosine
  modified_base 5: mod_base = OTHER; note = 2'O-methyl adenosine
  modified_base 6: mod_base = OTHER; note = 2'-fluoro cytidine
  modified_base 7: mod_base = OTHER; note = 2'O-methyl adenosine
  modified_base 8: mod_base = OTHER; note = 2'-fluoro cytidine
  modified_base 9: mod_base = OTHER; note = 2'O-methyl guanosine
  modified_base 10: mod_base = OTHER; note = 2'-fluoro guanosine
  modified_base 11: mod_base = OTHER; note = 2'O-methyl uridine
  modified_base 12: mod_base = OTHER; note = 2'-fluoro guanosine
  modified_base 13: mod_base = OTHER; note = 2'O-methyl adenosine
  modified_base 14: mod_base = OTHER; note = 2'-fluoro uridine
  modified_base 15: mod_base = OTHER; note = 2'O-methyl guanosine
  modified_base 16: mod_base = OTHER; note = 2'-fluoro guanosine
  modified_base 17: mod_base = OTHER; note = 2'O-methyl uridine
  modified_base 18: mod_base = OTHER; note = 2'-fluoro uridine
  modified_base 19: mod_base = OTHER; note = 2'O-methyl guanosine
  modified_base 20: mod_base = OTHER; note = 2'-fluoro uridine
  modified_base 21: mod_base = OTHER; note = 2'O-methyl uridine phosphorothioate
  modified_base 22: mod_base = OTHER; note = 2'O-methyl uridine phosphorothioate
  modified_base 23: mod_base = OTHER; note = 2'O-methyl uridine
ggggacacggtgatggttgtttt

SEQ ID NO: 1858 - RNA, 23 nt, synthetic construct
  source 1..23: mol_type = other RNA
  modified_base 1: mod_base = OTHER; note = 5' vinyl phosphonate 2'O-methyl guanosine phosphorothioate
  modified_base 2: mod_base = OTHER; note = 2'-fluoro guanosine phosphorothioate
  modified_base 3: mod_base = OTHER; note = 2'O-methyl guanosine
  modified_base 4: mod_base = OTHER; note = 2'-fluoro guanosine
  modified_base 5: mod_base = OTHER; note = 2'O-methyl guanosine
  modified_base 6: mod_base = OTHER; note = 2'-fluoro adenosine
  modified_base 7: mod_base = OTHER; note = 2'O-methyl cytidine
  modified_base 8: mod_base = OTHER; note = 2'-fluoro adenosine
  modified_base 9: mod_base = OTHER; note = 2'O-methyl cytidine
  modified_base 10: mod_base = OTHER; note = 2'-fluoro guanosine
  modified_base 11: mod_base = OTHER; note = 2'O-methyl guanosine
  modified_base 12: mod_base = OTHER; note = 2'-fluoro uridine
  modified_base 13: mod_base = OTHER; note = 2'O-methyl guanosine
  modified_base 14: mod_base = OTHER; note = 2'-fluoro adenosine
  modified_base 15: mod_base = OTHER; note = 2'O-methyl uridine
  modified_base 16: mod_base = OTHER; note = 2'-fluoro guanosine
  modified_base 17: mod_base = OTHER; note = 2'O-methyl guanosine
  modified_base 18: mod_base = OTHER; note = 2'-fluoro uridine
  modified_base 19: mod_base = OTHER; note = 2'O-methyl uridine
  modified_base 20: mod_base = OTHER; note = 2'-fluoro guanosine
  modified_base 21: mod_base = OTHER; note = 2'O-methyl uridine phosphorothioate
  modified_base 22: mod_base = OTHER; note = 2'O-methyl uridine phosphorothioate
  modified_base 23: mod_base = OTHER; note = 2'O-methyl uridine
gggggacacggtgatggttgttt

SEQ ID NO: 1859 - RNA, 23 nt, synthetic construct
  source 1..23: mol_type = other RNA
  modified_base 1: mod_base = OTHER; note = 5' vinyl phosphonate 2'O-methyl adenosine phosphorothioate
  modified_base 2: mod_base = OTHER; note = 2'-fluoro guanosine phosphorothioate
  modified_base 3: mod_base = OTHER; note = 2'O-methyl guanosine
  modified_base 4: mod_base = OTHER; note = 2'-fluoro guanosine
  modified_base 5: mod_base = OTHER; note = 2'O-methyl guanosine
  modified_base 6: mod_base = OTHER; note = 2'-fluoro guanosine
  modified_base 7: mod_base = OTHER; note = 2'O-methyl adenosine
  modified_base 8: mod_base = OTHER; note = 2'-fluoro cytidine
  modified_base 9: mod_base = OTHER; note = 2'O-methyl adenosine
  modified_base 10: mod_base = OTHER; note = 2'-fluoro cytidine
  modified_base 11: mod_base = OTHER; note = 2'O-methyl guanosine
  modified_base 12: mod_base = OTHER; note = 2'-fluoro guanosine
  modified_base 13: mod_base = OTHER; note = 2'O-methyl uridine
  modified_base 14: mod_base = OTHER; note = 2'-fluoro guanosine
  modified_base 15: mod_base = OTHER; note = 2'O-methyl adenosine
  modified_base 16: mod_base = OTHER; note = 2'-fluoro uridine
  modified_base 17: mod_base = OTHER; note = 2'O-methyl guanosine
  modified_base 18: mod_base = OTHER; note = 2'-fluoro guanosine
  modified_base 19: mod_base = OTHER; note = 2'O-methyl uridine
  modified_base 20: mod_base = OTHER; note = 2'-fluoro uridine
  modified_base 21: mod_base = OTHER; note = 2'O-methyl guanosine phosphorothioate
  modified_base 22: mod_base = OTHER; note = 2'O-methyl uridine phosphorothioate
  modified_base 23: mod_base = OTHER; note = 2'O-methyl uridine
agggggacacggtgatggttgtt

SEQ ID NO: 1860 - RNA, 23 nt, synthetic construct
  source 1..23: mol_type = other RNA
  modified_base 1: mod_base = OTHER; note = 5' vinyl phosphonate 2'O-methyl adenosine phosphorothioate
  modified_base 2: mod_base = OTHER; note = 2'-fluoro uridine phosphorothioate
  modified_base 3: mod_base = OTHER; note = 2'O-methyl adenosine
  modified_base 4: mod_base = OTHER; note = 2'-fluoro guanosine
  modified_base 5: mod_base = OTHER; note = 2'O-methyl adenosine
  modified_base 6: mod_base = OTHER; note = 2'-fluoro adenosine
  modified_base 7: mod_base = OTHER; note = 2'O-methyl guanosine
  modified_base 8: mod_base = OTHER; note = 2'-fluoro guanosine
  modified_base 9: mod_base = OTHER; note = 2'O-methyl guanosine
  modified_base 10: mod_base = OTHER; note = 2'-fluoro guanosine
  modified_base 11: mod_base = OTHER; note = 2'O-methyl guanosine
  modified_base 12: mod_base = OTHER; note = 2'-fluoro adenosine
  modified_base 13: mod_base = OTHER; note = 2'O-methyl cytidine
  modified_base 14: mod_base = OTHER; note = 2'-fluoro adenosine
  modified_base 15: mod_base = OTHER; note = 2'O-methyl cytidine
  modified_base 16: mod_base = OTHER; note = 2'-fluoro guanosine
  modified_base 17: mod_base = OTHER; note = 2'O-methyl guanosine
  modified_base 18: mod_base = OTHER; note = 2'-fluoro uridine
  modified_base 19: mod_base = OTHER; note = 2'O-methyl guanosine
  modified_base 20: mod_base = OTHER; note = 2'-fluoro adenosine
  modified_base 21: mod_base = OTHER; note = 2'O-methyl uridine phosphorothioate
  modified_base 22: mod_base = OTHER; note = 2'O-methyl uridine phosphorothioate
  modified_base 23: mod_base = OTHER; note = 2'O-methyl uridine
atagaagggggacacggtgattt

SEQ ID NO: 1861 - RNA, 23 nt, synthetic construct
  source 1..23: mol_type = other RNA
  modified_base 1: mod_base = OTHER; note = 5' vinyl phosphonate 2'O-methyl cytidine phosphorothioate
  modified_base 2: mod_base = OTHER; note = 2'-fluoro adenosine phosphorothioate
  modified_base 3: mod_base = OTHER; note = 2'O-methyl uridine
  modified_base 4: mod_base = OTHER; note = 2'-fluoro adenosine
  modified_base 5: mod_base = OTHER; note = 2'O-methyl guanosine
  modified_base 6: mod_base = OTHER; note = 2'-fluoro adenosine
  modified_base 7: mod_base = OTHER; note = 2'O-methyl adenosine
  modified_base 8: mod_base = OTHER; note = 2'-fluoro guanosine
  modified_base 9: mod_base = OTHER; note = 2'O-methyl guanosine
  modified_base 10: mod_base = OTHER; note = 2'-fluoro guanosine
  modified_base 11: mod_base = OTHER; note = 2'O-methyl guanosine
  modified_base 12: mod_base = OTHER; note = 2'-fluoro guanosine
  modified_base 13: mod_base = OTHER; note = 2'O-methyl adenosine
  modified_base 14: mod_base = OTHER; note = 2'-fluoro cytidine
  modified_base 15: mod_base = OTHER; note = 2'O-methyl adenosine
  modified_base 16: mod_base = OTHER; note = 2'-fluoro cytidine
  modified_base 17: mod_base = OTHER; note = 2'O-methyl guanosine
  modified_base 18: mod_base = OTHER; note = 2'-fluoro guanosine
  modified_base 19: mod_base = OTHER; note = 2'O-methyl uridine
  modified_base 20: mod_base = OTHER; note = 2'-fluoro guanosine
  modified_base 21: mod_base = OTHER; note = 2'O-methyl adenosine phosphorothioate
  modified_base 22: mod_base = OTHER; note = 2'O-methyl uridine phosphorothioate
  modified_base 23: mod_base = OTHER; note = 2'O-methyl uridine
catagaagggggacacggtgatt

SEQ ID NO: 1862 - RNA, 23 nt, synthetic construct
  source 1..23: mol_type = other RNA
  modified_base 1: mod_base = OTHER; note = 5' vinyl phosphonate 2'O-methyl cytidine phosphorothioate
  modified_base 2: mod_base = OTHER; note = 2'-fluoro cytidine phosphorothioate
  modified_base 3: mod_base = OTHER; note = 2'O-methyl adenosine
  modified_base 4: mod_base = OTHER; note = 2'-fluoro uridine
  modified_base 5: mod_base = OTHER; note = 2'O-methyl adenosine
  modified_base 6: mod_base = OTHER; note = 2'-fluoro guanosine
  modified_base 7: mod_base = OTHER; note = 2'O-methyl adenosine
  modified_base 8: mod_base = OTHER; note = 2'-fluoro adenosine
  modified_base 9: mod_base = OTHER; note = 2'O-methyl guanosine
  modified_base 10: mod_base = OTHER; note = 2'-fluoro guanosine
  modified_base 11: mod_base = OTHER; note = 2'O-methyl guanosine
  modified_base 12: mod_base = OTHER; note = 2'-fluoro guanosine
  modified_base 13: mod_base = OTHER; note = 2'O-methyl guanosine
  modified_base 14: mod_base = OTHER; note = 2'-fluoro adenosine
  modified_base 15: mod_base = OTHER; note = 2'O-methyl cytidine
  modified_base 16: mod_base = OTHER; note = 2'-fluoro adenosine
  modified_base 17: mod_base = OTHER; note = 2'O-methyl cytidine
  modified_base 18: mod_base = OTHER; note = 2'-fluoro guanosine
  modified_base 19: mod_base = OTHER; note = 2'O-methyl guanosine
  modified_base 20: mod_base = OTHER; note = 2'-fluoro uridine
  modified_base 21: mod_base = OTHER; note = 2'O-methyl guanosine phosphorothioate
  modified_base 22: mod_base = OTHER; note = 2'O-methyl uridine phosphorothioate
  modified_base 23: mod_base = OTHER; note = 2'O-methyl uridine
ccatagaagggggacacggtgtt

SEQ ID NO: 1863 - RNA, 23 nt, synthetic construct
  source 1..23: mol_type = other RNA
  modified_base 1: mod_base = OTHER; note = 5' vinyl phosphonate 2'O-methyl cytidine phosphorothioate
  modified_base 2: mod_base = OTHER; note = 2'-fluoro cytidine phosphorothioate
  modified_base 3: mod_base = OTHER; note = 2'O-methyl cytidine
  modified_base 4: mod_base = OTHER; note = 2'-fluoro adenosine
  modified_base 5: mod_base = OTHER; note = 2'O-methyl uridine
  modified_base 6: mod_base = OTHER; note = 2'-fluoro adenosine
  modified_base 7: mod_base = OTHER; note = 2'O-methyl guanosine
  modified_base 8: mod_base = OTHER; note = 2'-fluoro adenosine
  modified_base 9: mod_base = OTHER; note = 2'O-methyl adenosine
  modified_base 10: mod_base = OTHER; note = 2'-fluoro guanosine
  modified_base 11: mod_base = OTHER; note = 2'O-methyl guanosine
  modified_base 12: mod_base = OTHER; note = 2'-fluoro guanosine
  modified_base 13: mod_base = OTHER; note = 2'O-methyl guanosine
  modified_base 14: mod_base = OTHER; note = 2'-fluoro guanosine
  modified_base 15: mod_base = OTHER; note = 2'O-methyl adenosine
  modified_base 16: mod_base = OTHER; note = 2'-fluoro cytidine
  modified_base 17: mod_base = OTHER; note = 2'O-methyl adenosine
  modified_base 18: mod_base = OTHER; note = 2'-fluoro cytidine
  modified_base 19: mod_base = OTHER; note = 2'O-methyl guanosine
  modified_base 20: mod_base = OTHER; note = 2'-fluoro guanosine
  modified_base 21: mod_base = OTHER; note = 2'O-methyl uridine phosphorothioate
  modified_base 22: mod_base = OTHER; note = 2'O-methyl uridine phosphorothioate
  modified_base 23: mod_base = OTHER; note = 2'O-methyl uridine
cccatagaagggggacacggttt

SEQ ID NO: 1864 - RNA, 23 nt, synthetic construct
  source 1..23: mol_type = other RNA
  modified_base 1: mod_base = OTHER; note = 5' vinyl phosphonate 2'O-methyl cytidine phosphorothioate
  modified_base 2: mod_base = OTHER; note = 2'-fluoro uridine phosphorothioate
  modified_base 3: mod_base = OTHER; note = 2'O-methyl cytidine
  modified_base 4: mod_base = OTHER; note = 2'-fluoro cytidine
  modified_base 5: mod_base = OTHER; note = 2'O-methyl cytidine
  modified_base 6: mod_base = OTHER; note = 2'-fluoro cytidine
  modified_base 7: mod_base = OTHER; note = 2'O-methyl adenosine
  modified_base 8: mod_base = OTHER; note = 2'-fluoro uridine
  modified_base 9: mod_base = OTHER; note = 2'O-methyl adenosine
  modified_base 10: mod_base = OTHER; note = 2'-fluoro guanosine
  modified_base 11: mod_base = OTHER; note = 2'O-methyl adenosine
  modified_base 12: mod_base = OTHER; note = 2'-fluoro adenosine
  modified_base 13: mod_base = OTHER; note = 2'O-methyl guanosine
  modified_base 14: mod_base = OTHER; note = 2'-fluoro guanosine
  modified_base 15: mod_base = OTHER; note = 2'O-methyl guanosine
  modified_base 16: mod_base = OTHER; note = 2'-fluoro guanosine
  modified_base 17: mod_base = OTHER; note = 2'O-methyl guanosine
  modified_base 18: mod_base = OTHER; note = 2'-fluoro adenosine
  modified_base 19: mod_base = OTHER; note = 2'O-methyl cytidine
  modified_base 20: mod_base = OTHER; note = 2'-fluoro adenosine
  modified_base 21: mod_base = OTHER; note = 2'O-methyl cytidine phosphorothioate
  modified_base 22: mod_base = OTHER; note = 2'O-methyl uridine phosphorothioate
  modified_base 23: mod_base = OTHER; note = 2'O-methyl uridine
ctccccatagaagggggacactt

SEQ ID NO: 1865 - RNA, 23 nt, synthetic construct
  source 1..23: mol_type = other RNA
  modified_base 1: mod_base = OTHER; note = 5' vinyl phosphonate 2'O-methyl adenosine phosphorothioate
  modified_base 2: mod_base = OTHER; note = 2'-fluoro cytidine phosphorothioate
  modified_base 3: mod_base = OTHER; note = 2'O-methyl uridine
  modified_base 4: mod_base = OTHER; note = 2'-fluoro cytidine
  modified_base 5: mod_base = OTHER; note = 2'O-methyl cytidine
  modified_base 6: mod_base = OTHER; note = 2'-fluoro cytidine
  modified_base 7: mod_base = OTHER; note = 2'O-methyl cytidine
  modified_base 8: mod_base = OTHER; note = 2'-fluoro adenosine
  modified_base 9: mod_base = OTHER; note = 2'O-methyl uridine
  modified_base 10: mod_base = OTHER; note = 2'-fluoro adenosine
  modified_base 11: mod_base = OTHER; note = 2'O-methyl guanosine
  modified_base 12: mod_base = OTHER; note = 2'-fluoro adenosine
  modified_base 13: mod_base = OTHER; note = 2'O-methyl adenosine
  modified_base 14: mod_base = OTHER; note = 2'-fluoro guanosine
  modified_base 15: mod_base = OTHER; note = 2'O-methyl guanosine
  modified_base 16: mod_base = OTHER; note = 2'-fluoro guanosine
  modified_base 17: mod_base = OTHER; note = 2'O-methyl guanosine
  modified_base 18: mod_base = OTHER; note = 2'-fluoro guanosine
  modified_base 19: mod_base = OTHER; note = 2'O-methyl adenosine
  modified_base 20: mod_base = OTHER; note = 2'-fluoro cytidine
  modified_base 21: mod_base = OTHER; note = 2'O-methyl adenosine phosphorothioate
  modified_base 22: mod_base = OTHER; note = 2'O-methyl uridine phosphorothioate
  modified_base 23: mod_base = OTHER; note = 2'O-methyl uridine
actccccatagaagggggacatt

SEQ ID NO: 1866 - RNA, 23 nt, synthetic construct
  source 1..23: mol_type = other RNA
  modified_base 1: mod_base = OTHER; note = 5' vinyl phosphonate 2'O-methyl uridine phosphorothioate
  modified_base 2: mod_base = OTHER; note = 2'-fluoro adenosine phosphorothioate
  modified_base 3: mod_base = OTHER; note = 2'O-methyl cytidine
  modified_base 4: mod_base = OTHER; note = 2'-fluoro uridine
  modified_base 5: mod_base = OTHER; note = 2'O-methyl cytidine
  modified_base 6: mod_base = OTHER; note = 2'-fluoro cytidine
  modified_base 7: mod_base = OTHER; note = 2'O-methyl cytidine
  modified_base 8: mod_base = OTHER; note = 2'-fluoro cytidine
  modified_base 9: mod_base = OTHER; note = 2'O-methyl adenosine
  modified_base 10: mod_base = OTHER; note = 2'-fluoro uridine
  modified_base 11: mod_base = OTHER; note = 2'O-methyl adenosine
  modified_base 12: mod_base = OTHER; note = 2'-fluoro guanosine
  modified_base 13: mod_base = OTHER; note = 2'O-methyl adenosine
  modified_base 14: mod_base = OTHER; note = 2'-fluoro adenosine
  modified_base 15: mod_base = OTHER; note = 2'O-methyl guanosine
  modified_base 16: mod_base = OTHER; note = 2'-fluoro guanosine
  modified_base 17: mod_base = OTHER; note = 2'O-methyl guanosine
  modified_base 18: mod_base = OTHER; note = 2'-fluoro guanosine
  modified_base 19: mod_base = OTHER; note = 2'O-methyl guanosine
  modified_base 20: mod_base = OTHER; note = 2'-fluoro adenosine
  modified_base 21: mod_base = OTHER; note = 2'O-methyl cytidine phosphorothioate
  modified_base 22: mod_base = OTHER; note = 2'O-methyl uridine phosphorothioate
  modified_base 23: mod_base = OTHER; note = 2'O-methyl uridine
tactccccatagaagggggactt

SEQ ID NO: 1867 - RNA, 23 nt, synthetic construct
  source 1..23: mol_type = other RNA
  modified_base 1: mod_base = OTHER; note = 5' vinyl phosphonate 2'O-methyl guanosine phosphorothioate
  modified_base 2: mod_base = OTHER; note = 2'-fluoro uridine phosphorothioate
  modified_base 3: mod_base = OTHER; note = 2'O-methyl adenosine
  modified_base 4: mod_base = OTHER; note = 2'-fluoro cytidine
  modified_base 5: mod_base = OTHER; note = 2'O-methyl uridine
  modified_base 6: mod_base = OTHER; note = 2'-fluoro cytidine
  modified_base 7: mod_base = OTHER; note = 2'O-methyl cytidine
  modified_base 8: mod_base = OTHER; note = 2'-fluoro cytidine
  modified_base 9: mod_base = OTHER; note = 2'O-methyl cytidine
  modified_base 10: mod_base = OTHER; note = 2'-fluoro adenosine
  modified_base 11: mod_base = OTHER; note = 2'O-methyl uridine
  modified_base 12: mod_base = OTHER; note = 2'-fluoro adenosine
  modified_base 13: mod_base = OTHER; note = 2'O-methyl guanosine
  modified_base 14: mod_base = OTHER; note = 2'-fluoro adenosine
  modified_base 15: mod_base = OTHER; note = 2'O-methyl adenosine
  modified_base 16: mod_base = OTHER; note = 2'-fluoro guanosine
  modified_base 17: mod_base = OTHER; note = 2'O-methyl guanosine
  modified_base 18: mod_base = OTHER; note = 2'-fluoro guanosine
  modified_base 19: mod_base = OTHER; note = 2'O-methyl guanosine
  modified_base 20: mod_base = OTHER; note = 2'-fluoro guanosine
  modified_base 21: mod_base = OTHER; note = 2'O-methyl adenosine phosphorothioate
  modified_base 22: mod_base = OTHER; note = 2'O-methyl uridine phosphorothioate
  modified_base 23: mod_base = OTHER; note = 2'O-methyl uridine
gtactccccatagaagggggatt

SEQ ID NO: 1868 - RNA, 23 nt, synthetic construct
  source 1..23: mol_type = other RNA
  modified_base 1: mod_base = OTHER; note = 5' vinyl phosphonate 2'O-methyl guanosine phosphorothioate
  modified_base 2: mod_base = OTHER; note = 2'-fluoro uridine phosphorothioate
  modified_base 3: mod_base = OTHER; note = 2'O-methyl cytidine
  modified_base 4: mod_base = OTHER; note = 2'-fluoro guanosine
  modified_base 5: mod_base = OTHER; note = 2'O-methyl uridine
  modified_base 6: mod_base = OTHER; note = 2'-fluoro adenosine
  modified_base 7: mod_base = OTHER; note = 2'O-methyl cytidine
  modified_base 8: mod_base = OTHER; note = 2'-fluoro uridine
  modified_base 9: mod_base = OTHER; note = 2'O-methyl cytidine
  modified_base 10: mod_base = OTHER; note = 2'-fluoro cytidine
  modified_base 11: mod_base = OTHER; note = 2'O-methyl cytidine
  modified_base 12: mod_base = OTHER; note = 2'-fluoro cytidine
  modified_base 13: mod_base = OTHER; note = 2'O-methyl adenosine
  modified_base 14: mod_base = OTHER; note = 2'-fluoro uridine
  modified_base 15: mod_base = OTHER; note = 2'O-methyl adenosine
  modified_base 16: mod_base = OTHER; note = 2'-fluoro guanosine
  modified_base 17: mod_base = OTHER; note = 2'O-methyl adenosine
  modified_base 18: mod_base = OTHER; note = 2'-fluoro adenosine
  modified_base 19: mod_base = OTHER; note = 2'O-methyl guanosine
  modified_base 20: mod_base = OTHER; note = 2'-fluoro guanosine
  modified_base 21: mod_base = OTHER; note = 2'O-methyl guanosine phosphorothioate
  modified_base 22: mod_base = OTHER; note = 2'O-methyl uridine phosphorothioate
  modified_base 23: mod_base = OTHER; note = 2'O-methyl uridine
gtcgtactccccatagaagggtt

SEQ ID NO: 1869 - RNA, 23 nt, synthetic construct
  source 1..23: mol_type = other RNA
  modified_base 1: mod_base = OTHER; note = 5' vinyl phosphonate 2'O-methyl uridine phosphorothioate
  modified_base 2: mod_base = OTHER; note = 2'-fluoro guanosine phosphorothioate
  modified_base 3: mod_base = OTHER; note = 2'O-methyl uridine
  modified_base 4: mod_base = OTHER; note = 2'-fluoro cytidine
  modified_base 5: mod_base = OTHER; note = 2'O-methyl guanosine
  modified_base 6: mod_base = OTHER; note = 2'-fluoro uridine
  modified_base 7: mod_base = OTHER; note = 2'O-methyl adenosine
  modified_base 8: mod_base = OTHER; note = 2'-fluoro cytidine
  modified_base 9: mod_base = OTHER; note = 2'O-methyl uridine
  modified_base 10: mod_base = OTHER; note = 2'-fluoro cytidine
  modified_base 11: mod_base = OTHER; note = 2'O-methyl cytidine
  modified_base 12: mod_base = OTHER; note = 2'-fluoro cytidine
  modified_base 13: mod_base = OTHER; note = 2'O-methyl cytidine
  modified_base 14: mod_base = OTHER; note = 2'-fluoro adenosine
  modified_base 15: mod_base = OTHER; note = 2'O-methyl uridine
  modified_base 16: mod_base = OTHER; note = 2'-fluoro adenosine
  modified_base 17: mod_base = OTHER; note = 2'O-methyl guanosine
  modified_base 18: mod_base = OTHER; note = 2'-fluoro adenosine
  modified_base 19: mod_base = OTHER; note = 2'O-methyl adenosine
  modified_base 20: mod_base = OTHER; note = 2'-fluoro guanosine
  modified_base 21: mod_base = OTHER; note = 2'O-methyl guanosine phosphorothioate
  modified_base 22: mod_base = OTHER; note = 2'O-methyl uridine phosphorothioate
  modified_base 23: mod_base = OTHER; note = 2'O-methyl uridine
tgtcgtactccccatagaaggtt

SEQ ID NO: 1870 - RNA, 23 nt, synthetic construct
  source 1..23: mol_type = other RNA
  modified_base 1: mod_base = OTHER; note = 5' vinyl phosphonate 2'O-methyl guanosine phosphorothioate
  modified_base 2: mod_base = OTHER; note = 2'-fluoro adenosine phosphorothioate
  modified_base 3: mod_base = OTHER; note = 2'O-methyl uridine
  modified_base 4: mod_base = OTHER; note = 2'-fluoro guanosine
  modified_base 5: mod_base = OTHER; note = 2'O-methyl uridine
  modified_base 6: mod_base = OTHER; note = 2'-fluoro cytidine
  modified_base 7: mod_base = OTHER; note = 2'O-methyl guanosine
  modified_base 8: mod_base = OTHER; note = 2'-fluoro uridine
  modified_base 9: mod_base = OTHER; note = 2'O-methyl adenosine
  modified_base 10: mod_base = OTHER; note = 2'-fluoro cytidine
  modified_base 11: mod_base = OTHER; note = 2'O-methyl uridine
  modified_base 12: mod_base = OTHER; note = 2'-fluoro cytidine
  modified_base 13: mod_base = OTHER; note = 2'O-methyl cytidine
  modified_base 14: mod_base = OTHER; note = 2'-fluoro cytidine
  modified_base 15: mod_base = OTHER; note = 2'O-methyl cytidine
  modified_base 16: mod_base = OTHER; note = 2'-fluoro adenosine
  modified_base 17: mod_base = OTHER; note = 2'O-methyl uridine
  modified_base 18: mod_base = OTHER; note = 2'-fluoro adenosine
  modified_base 19: mod_base = OTHER; note = 2'O-methyl guanosine
  modified_base 20: mod_base = OTHER; note = 2'-fluoro adenosine
  modified_base 21: mod_base = OTHER; note = 2'O-methyl adenosine phosphorothioate
  modified_base 22: mod_base = OTHER; note = 2'O-methyl uridine phosphorothioate
  modified_base 23: mod_base = OTHER; note = 2'O-methyl uridine
gatgtcgtactccccatagaatt

SEQ ID NO: 1871 - RNA, 23 nt, synthetic construct
  source 1..23: mol_type = other RNA
  modified_base 1: mod_base = OTHER; note = 5' vinyl phosphonate 2'O-methyl adenosine phosphorothioate
  modified_base 2: mod_base = OTHER; note = 2'-fluoro guanosine phosphorothioate
  modified_base 3: mod_base = OTHER; note = 2'O-methyl adenosine
  modified_base 4: mod_base = OTHER; note = 2'-fluoro uridine
  modified_base 5: mod_base = OTHER; note = 2'O-methyl guanosine
  modified_base 6: mod_base = OTHER; note = 2'-fluoro uridine
  modified_base 7: mod_base = OTHER; note = 2'O-methyl cytidine
  modified_base 8: mod_base = OTHER; note = 2'-fluoro guanosine
  modified_base 9: mod_base = OTHER; note = 2'O-methyl uridine
  modified_base 10: mod_base = OTHER; note = 2'-fluoro adenosine
  modified_base 11: mod_base = OTHER; note = 2'O-methyl cytidine
  modified_base 12: mod_base = OTHER; note = 2'-fluoro uridine
  modified_base 13: mod_base = OTHER; note = 2'O-methyl cytidine
  modified_base 14: mod_base = OTHER; note = 2'-fluoro cytidine
  modified_base 15: mod_base = OTHER; note = 2'O-methyl cytidine
  modified_base 16: mod_base = OTHER; note = 2'-fluoro cytidine
  modified_base 17: mod_base = OTHER; note = 2'O-methyl adenosine
  modified_base 18: mod_base = OTHER; note = 2'-fluoro uridine
  modified_base 19: mod_base = OTHER; note = 2'O-methyl adenosine
  modified_base 20: mod_base = OTHER; note = 2'-fluoro guanosine
  modified_base 21: mod_base = OTHER; note = 2'O-methyl adenosine phosphorothioate
  modified_base 22: mod_base = OTHER; note = 2'O-methyl uridine phosphorothioate
  modified_base 23: mod_base = OTHER; note = 2'O-methyl uridine
agatgtcgtactccccatagatt

SEQ ID NO: 1872 - RNA, 23 nt, synthetic construct
  source 1..23: mol_type = other RNA
  modified_base 1: mod_base = OTHER; note = 5' vinyl phosphonate 2'O-methyl cytidine phosphorothioate
  modified_base 2: mod_base = OTHER; note = 2'-fluoro adenosine phosphorothioate
  modified_base 3: mod_base = OTHER; note = 2'O-methyl guanosine
  modified_base 4: mod_base = OTHER; note = 2'-fluoro adenosine
  modified_base 5: mod_base = OTHER; note = 2'O-methyl uridine
  modified_base 6: mod_base = OTHER; note = 2'-fluoro guanosine
  modified_base 7: mod_base = OTHER; note = 2'O-methyl uridine
  modified_base 8: mod_base = OTHER; note = 2'-fluoro cytidine
  modified_base 9: mod_base = OTHER; note = 2'O-methyl guanosine
  modified_base 10: mod_base = OTHER; note = 2'-fluoro uridine
  modified_base 11: mod_base = OTHER; note = 2'O-methyl adenosine
  modified_base 12: mod_base = OTHER; note = 2'-fluoro cytidine
  modified_base 13: mod_base = OTHER; note = 2'O-methyl uridine
  modified_base 14: mod_base = OTHER; note = 2'-fluoro cytidine
  modified_base 15: mod_base = OTHER; note = 2'O-methyl cytidine
  modified_base 16: mod_base = OTHER; note = 2'-fluoro cytidine
  modified_base 17: mod_base = OTHER; note = 2'O-methyl cytidine
  modified_base 18: mod_base = OTHER; note = 2'-fluoro adenosine
  modified_base 19: mod_base = OTHER; note = 2'O-methyl uridine
  modified_base 20: mod_base = OTHER; note = 2'-fluoro adenosine
  modified_base 21: mod_base = OTHER; note = 2'O-methyl guanosine phosphorothioate
  modified_base 22: mod_base = OTHER; note = 2'O-methyl uridine phosphorothioate
  modified_base 23: mod_base = OTHER; note = 2'O-methyl uridine
cagatgtcgtactccccatagtt

SEQ ID NO: 1873 - RNA, 23 nt, synthetic construct
  source 1..23: mol_type = other RNA
  modified_base 1: mod_base = OTHER; note = 5' vinyl phosphonate 2'O-methyl guanosine phosphorothioate
  modified_base 2: mod_base = OTHER; note = 2'-fluoro cytidine phosphorothioate
  modified_base 3: mod_base = OTHER; note = 2'O-methyl adenosine
  modified_base 4: mod_base = OTHER; note = 2'-fluoro guanosine
  modified_base 5: mod_base = OTHER; note = 2'O-methyl adenosine
  modified_base 6: mod_base = OTHER; note = 2'-fluoro uridine
  modified_base 7: mod_base = OTHER; note = 2'O-methyl guanosine
  modified_base 8: mod_base = OTHER; note = 2'-fluoro uridine
  modified_base 9: mod_base = OTHER; note = 2'O-methyl cytidine
  modified_base 10: mod_base = OTHER; note = 2'-fluoro guanosine
  modified_base 11: mod_base = OTHER; note = 2'O-methyl uridine
  modified_base 12: mod_base = OTHER; note = 2'-fluoro adenosine
  modified_base 13: mod_base = OTHER; note = 2'O-methyl cytidine
  modified_base 14: mod_base = OTHER; note = 2'-fluoro uridine
  modified_base 15: mod_base = OTHER; note = 2'O-methyl cytidine
  modified_base 16: mod_base = OTHER; note = 2'-fluoro cytidine
  modified_base 17: mod_base = OTHER; note = 2'O-methyl cytidine
  modified_base 18: mod_base = OTHER; note = 2'-fluoro cytidine
  modified_base 19: mod_base = OTHER; note = 2'O-methyl adenosine
  modified_base 20: mod_base = OTHER; note = 2'-fluoro uridine
  modified_base 21: mod_base = OTHER; note = 2'O-methyl adenosine phosphorothioate
  modified_base 22: mod_base = OTHER; note = 2'O-methyl uridine phosphorothioate
  modified_base 23: mod_base = OTHER; note = 2'O-methyl uridine
gcagatgtcgtactccccatatt

SEQ ID NO: 1874 - RNA, 23 nt, synthetic construct
  source 1..23: mol_type = other RNA
  modified_base 1: mod_base = OTHER; note = 5' vinyl phosphonate 2'O-methyl uridine phosphorothioate
  modified_base 2: mod_base = OTHER; note = 2'-fluoro guanosine phosphorothioate
  modified_base 3: mod_base = OTHER; note = 2'O-methyl adenosine
  modified_base 4: mod_base = OTHER; note = 2'-fluoro cytidine
  modified_base 5: mod_base = OTHER; note = 2'O-methyl uridine
  modified_base 6: mod_base = OTHER; note = 2'-fluoro uridine
  modified_base 7: mod_base = OTHER; note = 2'O-methyl uridine
  modified_base 8: mod_base = OTHER; note = 2'-fluoro adenosine
  modified_base 9: mod_base = OTHER; note = 2'O-methyl guanosine
  modified_base 10: mod_base = OTHER; note = 2'-fluoro guanosine
  modified_base 11: mod_base = OTHER; note = 2'O-methyl guanosine
  modified_base 12: mod_base = OTHER; note = 2'-fluoro cytidine
  modified_base 13: mod_base = OTHER; note = 2'O-methyl adenosine
  modified_base 14: mod_base = OTHER; note = 2'-fluoro guanosine
  modified_base 15: mod_base = OTHER; note = 2'O-methyl adenosine
  modified_base 16: mod_base = OTHER; note = 2'-fluoro uridine
  modified_base 17: mod_base = OTHER; note = 2'O-methyl guanosine
  modified_base 18: mod_base = OTHER; note = 2'-fluoro uridine
  modified_base 19: mod_base = OTHER; note = 2'O-methyl cytidine
  modified_base 20: mod_base = OTHER; note = 2'-fluoro guanosine
  modified_base 21: mod_base = OTHER; note = 2'O-methyl uridine phosphorothioate
  modified_base 22: mod_base = OTHER; note = 2'O-methyl uridine phosphorothioate
  modified_base 23: mod_base = OTHER; note = 2'O-methyl uridine
tgactttagggcagatgtcgttt

SEQ ID NO: 1875 - RNA, 23 nt, synthetic construct
  source 1..23: mol_type = other RNA
  modified_base 1: mod_base = OTHER; note = 5' vinyl phosphonate 2'O-methyl uridine phosphorothioate
  modified_base 2: mod_base = OTHER; note = 2'-fluoro uridine phosphorothioate
  modified_base 3: mod_base = OTHER; note = 2'O-methyl guanosine
  modified_base 4: mod_base = OTHER; note = 2'-fluoro adenosine
  modified_base 5: mod_base = OTHER; note = 2'O-methyl cytidine
  modified_base 6: mod_base = OTHER; note = 2'-fluoro uridine
  modified_base 7: mod_base = OTHER; note = 2'O-methyl uridine
  modified_base 8: mod_base = OTHER; note = 2'-fluoro uridine
  modified_base 9: mod_base = OTHER; note = 2'O-methyl adenosine
  modified_base 10: mod_base = OTHER; note = 2'-fluoro guanosine
  modified_base 11: mod_base = OTHER; note = 2'O-methyl guanosine
  modified_base 12: mod_base = OTHER; note = 2'-fluoro guanosine
  modified_base 13: mod_base = OTHER; note = 2'O-methyl cytidine
  modified_base 14: mod_base = OTHER; note = 2'-fluoro adenosine
  modified_base 15: mod_base = OTHER; note = 2'O-methyl guanosine
  modified_base 16: mod_base = OTHER; note = 2'-fluoro adenosine
  modified_base 17: mod_base = OTHER; note = 2'O-methyl uridine
  modified_base 18: mod_base = OTHER; note = 2'-fluoro guanosine
  modified_base 19: mod_base = OTHER; note = 2'O-methyl uridine
  modified_base 20: mod_base = OTHER; note = 2'-fluoro cytidine
  modified_base 21: mod_base = OTHER; note = 2'O-methyl guanosine phosphorothioate
  modified_base 22: mod_base = OTHER; note = 2'O-methyl uridine phosphorothioate
  modified_base 23: mod_base = OTHER; note = 2'O-methyl uridine
ttgactttagggcagatgtcgtt

SEQ ID NO: 1876 - RNA, 23 nt, synthetic construct
  source 1..23: mol_type = other RNA
  modified_base 1: mod_base = OTHER; note = 5' vinyl phosphonate 2'O-methyl cytidine phosphorothioate
  modified_base 2: mod_base = OTHER; note = 2'-fluoro uridine phosphorothioate
  modified_base 3: mod_base = OTHER; note = 2'O-methyl uridine
  modified_base 4: mod_base = OTHER; note = 2'-fluoro guanosine
  modified_base 5: mod_base = OTHER; note = 2'O-methyl adenosine
  modified_base 6: mod_base = OTHER; note = 2'-fluoro cytidine
  modified_base 7: mod_base = OTHER; note = 2'O-methyl uridine
  modified_base 8: mod_base = OTHER; note = 2'-fluoro uridine
  modified_base 9: mod_base = OTHER; note = 2'O-methyl uridine
  modified_base 10: mod_base = OTHER; note = 2'-fluoro adenosine
  modified_base 11: mod_base = OTHER; note = 2'O-methyl guanosine
  modified_base 12: mod_base = OTHER; note = 2'-fluoro guanosine
  modified_base 13: mod_base = OTHER; note = 2'O-methyl guanosine
  modified_base 14: mod_base = OTHER; note = 2'-fluoro cytidine
  modified_base 15: mod_base = OTHER; note = 2'O-methyl adenosine
  modified_base 16: mod_base = OTHER; note = 2'-fluoro guanosine
  modified_base 17: mod_base = OTHER; note = 2'O-methyl adenosine
  modified_base 18: mod_base = OTHER; note = 2'-fluoro uridine
  modified_base 19: mod_base = OTHER; note = 2'O-methyl guanosine
  modified_base 20: mod_base = OTHER; note = 2'-fluoro uridine
  modified_base 21: mod_base = OTHER; note = 2'O-methyl cytidine phosphorothioate
  modified_base 22: mod_base = OTHER; note = 2'O-methyl uridine phosphorothioate
  modified_base 23: mod_base = OTHER; note = 2'O-methyl uridine
cttgactttagggcagatgtctt

SEQ ID NO: 1877 - RNA, 23 nt, synthetic construct
  source 1..23: mol_type = other RNA
  modified_base 1: mod_base = OTHER; note = 5' vinyl phosphonate 2'O-methyl adenosine phosphorothioate
  modified_base 2: mod_base = OTHER; note = 2'-fluoro cytidine phosphorothioate
  modified_base 3: mod_base = OTHER; note = 2'O-methyl uridine
  modified_base 4: mod_base = OTHER; note = 2'-fluoro uridine
  modified_base 5: mod_base = OTHER; note = 2'O-methyl guanosine
  modified_base 6: mod_base = OTHER; note = 2'-fluoro adenosine
  modified_base 7: mod_base = OTHER; note = 2'O-methyl cytidine
  modified_base 8: mod_base = OTHER; note = 2'-fluoro uridine
  modified_base 9: mod_base = OTHER; note = 2'O-methyl uridine
  modified_base 10: mod_base = OTHER; note = 2'-fluoro uridine
  modified_base 11: mod_base = OTHER; note = 2'O-methyl adenosine
  modified_base 12: mod_base = OTHER; note = 2'-fluoro guanosine
  modified_base 13: mod_base = OTHER; note = 2'O-methyl guanosine
  modified_base 14: mod_base = OTHER; note = 2'-fluoro guanosine
  modified_base 15: mod_base = OTHER; note = 2'O-methyl cytidine
  modified_base 16: mod_base = OTHER; note = 2'-fluoro adenosine
  modified_base 17: mod_base = OTHER; note = 2'O-methyl guanosine
  modified_base 18: mod_base = OTHER; note = 2'-fluoro adenosine
  modified_base 19: mod_base = OTHER; note = 2'O-methyl uridine
  modified_base 20: mod_base = OTHER; note = 2'-fluoro guanosine
  modified_base 21: mod_base = OTHER; note = 2'O-methyl uridine phosphorothioate
  modified_base 22: mod_base = OTHER; note = 2'O-methyl uridine phosphorothioate
  modified_base 23: mod_base = OTHER; note = 2'O-methyl uridine
acttgactttagggcagatgttt

SEQ ID NO: 1878 - RNA, 23 nt, synthetic construct
  source 1..23: mol_type = other RNA
  modified_base 1: mod_base = OTHER; note = 5' vinyl phosphonate 2'O-methyl guanosine phosphorothioate
  modified_base 2: mod_base = OTHER; note = 2'-fluoro adenosine phosphorothioate
  modified_base 3: mod_base = OTHER; note = 2'O-methyl cytidine
  modified_base 4: mod_base = OTHER; note = 2'-fluoro uridine
  modified_base 5: mod_base = OTHER; note = 2'O-methyl uridine
  modified_base 6: mod_base = OTHER; note = 2'-fluoro guanosine
  modified_base 7: mod_base = OTHER; note = 2'O-methyl adenosine
  modified_base 8: mod_base = OTHER; note = 2'-fluoro cytidine
  modified_base 9: mod_base = OTHER; note = 2'O-methyl uridine
  modified_base 10: mod_base = OTHER; note = 2'-fluoro uridine
  modified_base 11: mod_base = OTHER; note = 2'O-methyl uridine
  modified_base 12: mod_base = OTHER; note = 2'-fluoro adenosine
  modified_base 13: mod_base = OTHER; note = 2'O-methyl guanosine
  modified_base 14: mod_base = OTHER; note = 2'-fluoro guanosine
  modified_base 15: mod_base = OTHER; note = 2'O-methyl guanosine
  modified_base 16: mod_base = OTHER; note = 2'-fluoro cytidine
  modified_base 17: mod_base = OTHER; note = 2'O-methyl adenosine
  modified_base 18: mod_base = OTHER; note = 2'-fluoro guanosine
  modified_base 19: mod_base = OTHER; note = 2'O-methyl adenosine
  modified_base 20: mod_base = OTHER; note = 2'-fluoro uridine
  modified_base 21: mod_base = OTHER; note = 2'O-methyl guanosine phosphorothioate
  modified_base 22: mod_base = OTHER; note = 2'O-methyl uridine phosphorothioate
  modified_base 23: mod_base = OTHER; note = 2'O-methyl uridine
gacttgactttagggcagatgtt

SEQ ID NO: 1879 - RNA, 23 nt, synthetic construct
  source 1..23: mol_type = other RNA
  modified_base 1: mod_base = OTHER; note = 5' vinyl phosphonate 2'O-methyl guanosine phosphorothioate
  modified_base 2: mod_base = OTHER; note = 2'-fluoro guanosine phosphorothioate
  modified_base 3: mod_base = OTHER; note = 2'O-methyl adenosine
  modified_base 4: mod_base = OTHER; note = 2'-fluoro cytidine
  modified_base 5: mod_base = OTHER; note = 2'O-methyl uridine
  modified_base 6: mod_base = OTHER; note = 2'-fluoro uridine
  modified_base 7: mod_base = OTHER; note = 2'O-methyl guanosine
  modified_base 8: mod_base = OTHER; note = 2'-fluoro adenosine
  modified_base 9: mod_base = OTHER; note = 2'O-methyl cytidine
  modified_base 10: mod_base = OTHER; note = 2'-fluoro uridine
  modified_base 11: mod_base = OTHER; note = 2'O-methyl uridine
  modified_base 12: mod_base = OTHER; note = 2'-fluoro uridine
  modified_base 13: mod_base = OTHER; note = 2'O-methyl adenosine
  modified_base 14: mod_base = OTHER; note = 2'-fluoro guanosine
  modified_base 15: mod_base = OTHER; note = 2'O-methyl guanosine
  modified_base 16: mod_base = OTHER; note = 2'-fluoro guanosine
  modified_base 17: mod_base = OTHER; note = 2'O-methyl cytidine
  modified_base 18: mod_base = OTHER; note = 2'-fluoro adenosine
  modified_base 19: mod_base = OTHER; note = 2'O-methyl guanosine
  modified_base 20: mod_base = OTHER; note = 2'-fluoro adenosine
  modified_base 21: mod_base = OTHER; note = 2'O-methyl uridine phosphorothioate
  modified_base 22: mod_base = OTHER; note = 2'O-methyl uridine phosphorothioate
  modified_base 23: mod_base = OTHER; note = 2'O-methyl uridine
ggacttgactttagggcagattt

SEQ ID NO: 1880 - RNA, 23 nt, synthetic construct
  source 1..23: mol_type = other RNA
  modified_base 1: mod_base = OTHER; note = 5' vinyl phosphonate 2'O-methyl uridine phosphorothioate
  modified_base 2: mod_base = OTHER; note = 2'-fluoro uridine phosphorothioate
  modified_base 3: mod_base = OTHER; note = 2'O-methyl cytidine
  modified_base 4: mod_base = OTHER; note = 2'-fluoro guanosine
  modified_base 5: mod_base = OTHER; note = 2'O-methyl uridine
  modified_base 6: mod_base = OTHER; note = 2'-fluoro guanosine
  modified_base 7: mod_base = OTHER; note = 2'O-methyl guanosine
  modified_base 8: mod_base = OTHER; note = 2'-fluoro adenosine
  modified_base 9: mod_base = OTHER; note = 2'O-methyl cytidine
  modified_base 10: mod_base = OTHER; note = 2'-fluoro uridine
  modified_base 11: mod_base = OTHER; note = 2'O-methyl uridine
  modified_base 12: mod_base = OTHER; note = 2'-fluoro guanosine
  modified_base 13: mod_base = OTHER; note = 2'O-methyl adenosine
  modified_base 14: mod_base = OTHER; note = 2'-fluoro cytidine
  modified_base 15: mod_base = OTHER; note = 2'O-methyl uridine
  modified_base 16: mod_base = OTHER; note = 2'-fluoro uridine
  modified_base 17: mod_base = OTHER; note = 2'O-methyl uridine
  modified_base 18: mod_base = OTHER; note = 2'-fluoro adenosine
  modified_base 19: mod_base = OTHER; note = 2'O-methyl guanosine
  modified_base 20: mod_base = OTHER; note = 2'-fluoro guanosine
  modified_base 21: mod_base = OTHER; note = 2'O-methyl guanosine phosphorothioate
  modified_base 22: mod_base = OTHER; note = 2'O-methyl uridine phosphorothioate
  modified_base 23: mod_base = OTHER; note = 2'O-methyl uridine
ttcgtggacttgactttagggtt

SEQ ID NO: 1881 - RNA, 23 nt, synthetic construct
  source 1..23: mol_type = other RNA
  modified_base 1: mod_base = OTHER; note = 5' vinyl phosphonate 2'O-methyl guanosine phosphorothioate
  modified_base 2: mod_base = OTHER; note = 2'-fluoro uridine phosphorothioate
  modified_base 3: mod_base = OTHER; note = 2'O-methyl uridine
  modified_base 4: mod_base = OTHER; note = 2'-fluoro cytidine
  modified_base 5: mod_base = OTHER; note = 2'O-methyl guanosine
  modified_base 6: mod_base = OTHER; note = 2'-fluoro uridine
  modified_base 7: mod_base = OTHER; note = 2'O-methyl guanosine
  modified_base 8: mod_base = OTHER; note = 2'-fluoro guanosine
  modified_base 9: mod_base = OTHER; note = 2'O-methyl adenosine
  modified_base 10: mod_base = OTHER; note = 2'-fluoro cytidine
  modified_base 11: mod_base = OTHER; note = 2'O-methyl uridine
  modified_base 12: mod_base = OTHER; note = 2'-fluoro uridine
  modified_base 13: mod_base = OTHER; note = 2'O-methyl guanosine
  modified_base 14: mod_base = OTHER; note = 2'-fluoro adenosine
  modified_base 15: mod_base = OTHER; note = 2'O-methyl cytidine
  modified_base 16: mod_base = OTHER; note = 2'-fluoro uridine
  modified_base 17: mod_base = OTHER; note = 2'O-methyl uridine
  modified_base 18: mod_base = OTHER; note = 2'-fluoro uridine
  modified_base 19: mod_base = OTHER; note = 2'O-methyl adenosine
  modified_base 20: mod_base = OTHER; note = 2'-fluoro guanosine
  modified_base 21: mod_base = OTHER; note = 2'O-methyl guanosine phosphorothioate
  modified_base 22: mod_base = OTHER; note = 2'O-methyl uridine phosphorothioate
  modified_base 23: mod_base = OTHER; note = 2'O-methyl uridine
gttcgtggacttgactttaggtt

SEQ ID NO: 1882 - RNA, 23 nt, synthetic construct
  source 1..23: mol_type = other RNA
  modified_base 1: mod_base = OTHER; note = 5' vinyl phosphonate 2'O-methyl adenosine phosphorothioate
  modified_base 2: mod_base = OTHER; note = 2'-fluoro adenosine phosphorothioate
  modified_base 3: mod_base = OTHER; note = 2'O-methyl guanosine
  modified_base 4: mod_base = OTHER; note = 2'-fluoro uridine
  modified_base 5: mod_base = OTHER; note = 2'O-methyl uridine
  modified_base 6: mod_base = OTHER; note = 2'-fluoro cytidine
  modified_base 7: mod_base = OTHER; note = 2'O-methyl guanosine
  modified_base 8: mod_base = OTHER; note = 2'-fluoro uridine
  modified_base 9: mod_base = OTHER; note = 2'O-methyl guanosine
  modified_base 10: mod_base = OTHER; note = 2'-fluoro guanosine
  modified_base 11: mod_base = OTHER; note = 2'O-methyl adenosine
  modified_base 12: mod_base = OTHER; note = 2'-fluoro cytidine
  modified_base 13: mod_base = OTHER; note = 2'O-methyl uridine
  modified_base 14: mod_base = OTHER; note = 2'-fluoro uridine
  modified_base 15: mod_base = OTHER; note = 2'O-methyl guanosine
  modified_base 16: mod_base = OTHER; note = 2'-fluoro adenosine
  modified_base 17: mod_base = OTHER; note = 2'O-methyl cytidine
  modified_base 18: mod_base = OTHER; note = 2'-fluoro uridine
  modified_base 19: mod_base = OTHER; note = 2'O-methyl uridine
  modified_base 20: mod_base = OTHER; note = 2'-fluoro uridine
  modified_base 21: mod_base = OTHER; note = 2'O-methyl adenosine phosphorothioate
  modified_base 22: mod_base = OTHER; note = 2'O-methyl uridine phosphorothioate
  modified_base 23: mod_base = OTHER; note = 2'O-methyl uridine
aagttcgtggacttgactttatt

SEQ ID NO: 1883 - RNA, 23 nt, synthetic construct
  source 1..23: mol_type = other RNA
  modified_base 1: mod_base = OTHER; note = 5' vinyl phosphonate 2'O-methyl adenosine phosphorothioate
  modified_base 2: mod_base = OTHER; note = 2'-fluoro adenosine phosphorothioate
  modified_base 3: mod_base = OTHER; note = 2'O-methyl adenosine
  modified_base 4: mod_base = OTHER; note = 2'-fluoro guanosine
  modified_base 5: mod_base = OTHER; note = 2'O-methyl uridine
  modified_base 6: mod_base = OTHER; note = 2'-fluoro uridine
  modified_base 7: mod_base = OTHER; note = 2'O-methyl cytidine
  modified_base 8: mod_base = OTHER; note = 2'-fluoro guanosine
  modified_base 9: mod_base = OTHER; note = 2'O-methyl uridine
  modified_base 10: mod_base = OTHER; note = 2'-fluoro guanosine
  modified_base 11: mod_base = OTHER; note = 2'O-methyl guanosine
  modified_base 12: mod_base = OTHER; note = 2'-fluoro adenosine
  modified_base 13: mod_base = OTHER; note = 2'O-methyl cytidine
  modified_base 14: mod_base = OTHER; note = 2'-fluoro uridine
  modified_base 15: mod_base = OTHER; note = 2'O-methyl uridine
  modified_base 16: mod_base = OTHER; note = 2'-fluoro guanosine
  modified_base 17: mod_base = OTHER; note = 2'O-methyl adenosine
  modified_base 18: mod_base = OTHER; note = 2'-fluoro cytidine
  modified_base 19: mod_base = OTHER; note = 2'O-methyl uridine
  modified_base 20: mod_base = OTHER; note = 2'-fluoro uridine
  modified_base 21: mod_base = OTHER; note = 2'O-methyl uridine phosphorothioate
  modified_base 22: mod_base = OTHER; note = 2'O-methyl uridine phosphorothioate
  modified_base 23: mod_base = OTHER; note = 2'O-methyl uridine
aaagttcgtggacttgacttttt

SEQ ID NO: 1884 - RNA, 23 nt, synthetic construct
  source 1..23: mol_type = other RNA
  modified_base 1: mod_base = OTHER; note = 5' vinyl phosphonate 2'O-methyl guanosine phosphorothioate
  modified_base 2: mod_base = OTHER; note = 2'-fluoro adenosine phosphorothioate
  modified_base 3: mod_base = OTHER; note = 2'O-methyl adenosine
  modified_base 4: mod_base = OTHER; note = 2'-fluoro adenosine
  modified_base 5: mod_base = OTHER; note = 2'O-methyl guanosine
  modified_base 6: mod_base = OTHER; note = 2'-fluoro uridine
  modified_base 7: mod_base = OTHER; note = 2'O-methyl uridine
  modified_base 8: mod_base = OTHER; note = 2'-fluoro cytidine
  modified_base 9: mod_base = OTHER; note = 2'O-methyl guanosine
  modified_base 10: mod_base = OTHER; note = 2'-fluoro uridine
  modified_base 11: mod_base = OTHER; note = 2'O-methyl guanosine
  modified_base 12: mod_base = OTHER; note = 2'-fluoro guanosine
  modified_base 13: mod_base = OTHER; note = 2'O-methyl adenosine
  modified_base 14: mod_base = OTHER; note = 2'-fluoro cytidine
  modified_base 15: mod_base = OTHER; note = 2'O-methyl uridine
  modified_base 16: mod_base = OTHER; note = 2'-fluoro uridine
  modified_base 17: mod_base = OTHER; note = 2'O-methyl guanosine
  modified_base 18: mod_base = OTHER; note = 2'-fluoro adenosine
  modified_base 19: mod_base = OTHER; note = 2'O-methyl cytidine
  modified_base 20: mod_base = OTHER; note = 2'-fluoro uridine
  modified_base 21: mod_base = OTHER; note = 2'O-methyl uridine phosphorothioate
  modified_base 22: mod_base = OTHER; note = 2'O-methyl uridine phosphorothioate
  modified_base 23: mod_base = OTHER; note = 2'O-methyl uridine
gaaagttcgtggacttgactttt

SEQ ID NO: 1885 - RNA, 23 nt, synthetic construct
  source 1..23: mol_type = other RNA
  modified_base 1: mod_base = OTHER; note = 5' vinyl phosphonate 2'O-methyl adenosine phosphorothioate
  modified_base 2: mod_base = OTHER; note = 2'-fluoro guanosine phosphorothioate
  modified_base 3: mod_base = OTHER; note = 2'O-methyl adenosine
  modified_base 4: mod_base = OTHER; note = 2'-fluoro adenosine
  modified_base 5: mod_base = OTHER; note = 2'O-methyl adenosine
  modified_base 6: mod_base = OTHER; note = 2'-fluoro guanosine
  modified_base 7: mod_base = OTHER; note = 2'O-methyl uridine
  modified_base 8: mod_base = OTHER; note = 2'-fluoro uridine
  modified_base 9: mod_base = OTHER; note = 2'O-methyl cytidine
  modified_base 10: mod_base = OTHER; note = 2'-fluoro guanosine
  modified_base 11: mod_base = OTHER; note = 2'O-methyl uridine
  modified_base 12: mod_base = OTHER; note = 2'-fluoro guanosine
  modified_base 13: mod_base = OTHER; note = 2'O-methyl guanosine
  modified_base 14: mod_base = OTHER; note = 2'-fluoro adenosine
  modified_base 15: mod_base = OTHER; note = 2'O-methyl cytidine
  modified_base 16: mod_base = OTHER; note = 2'-fluoro uridine
  modified_base 17: mod_base = OTHER; note = 2'O-methyl uridine
  modified_base 18: mod_base = OTHER; note = 2'-fluoro guanosine
  modified_base 19: mod_base = OTHER; note = 2'O-methyl adenosine
  modified_base 20: mod_base = OTHER; note = 2'-fluoro cytidine
  modified_base 21: mod_base = OTHER; note = 2'O-methyl uridine phosphorothioate
  modified_base 22: mod_base = OTHER; note = 2'O-methyl uridine phosphorothioate
  modified_base 23: mod_base = OTHER; note = 2'O-methyl uridine
agaaagttcgtggacttgacttt

SEQ ID NO: 1886 - RNA, 23 nt, synthetic construct
  source 1..23: mol_type = other RNA
  modified_base 1: mod_base = OTHER; note = 5' vinyl phosphonate 2'O-methyl adenosine phosphorothioate
  modified_base 2: mod_base = OTHER; note = 2'-fluoro adenosine phosphorothioate
  modified_base 3: mod_base = OTHER; note = 2'O-methyl guanosine
  modified_base 4: mod_base = OTHER; note = 2'-fluoro adenosine
  modified_base 5: mod_base = OTHER; note = 2'O-methyl adenosine
  modified_base 6: mod_base = OTHER; note = 2'-fluoro adenosine
  modified_base 7: mod_base = OTHER; note = 2'O-methyl guanosine
  modified_base 8: mod_base = OTHER; note = 2'-fluoro uridine
  modified_base 9: mod_base = OTHER; note = 2'O-methyl uridine
  modified_base 10: mod_base = OTHER; note = 2'-fluoro cytidine
  modified_base 11: mod_base = OTHER; note = 2'O-methyl guanosine
  modified_base 12: mod_base = OTHER; note = 2'-fluoro uridine
  modified_base 13: mod_base = OTHER; note = 2'O-methyl guanosine
  modified_base 14: mod_base = OTHER; note = 2'-fluoro guanosine
  modified_base 15: mod_base = OTHER; note = 2'O-methyl adenosine
  modified_base 16: mod_base = OTHER; note = 2'-fluoro cytidine
  modified_base 17: mod_base = OTHER; note = 2'O-methyl uridine
  modified_base 18: mod_base = OTHER; note = 2'-fluoro uridine
  modified_base 19: mod_base = OTHER; note = 2'O-methyl guanosine
  modified_base 20: mod_base = OTHER; note = 2'-fluoro adenosine
  modified_base 21: mod_base = OTHER; note = 2'O-methyl cytidine phosphorothioate
  modified_base 22: mod_base = OTHER; note = 2'O-methyl uridine phosphorothioate
  modified_base 23: mod_base = OTHER; note = 2'O-methyl uridine
aagaaagttcgtggacttgactt

SEQ ID NO: 1887 - RNA, 23 nt, synthetic construct
  source 1..23: mol_type = other RNA
  modified_base 1: mod_base = OTHER; note = 5' vinyl phosphonate 2'O-methyl guanosine phosphorothioate
  modified_base 2: mod_base = OTHER; note = 2'-fluoro adenosine phosphorothioate
  modified_base 3: mod_base = OTHER; note = 2'O-methyl adenosine
  modified_base 4: mod_base = OTHER; note = 2'-fluoro guanosine
  modified_base 5: mod_base = OTHER; note = 2'O-methyl adenosine
  modified_base 6: mod_base = OTHER; note = 2'-fluoro adenosine
  modified_base 7: mod_base = OTHER; note = 2'O-methyl adenosine
  modified_base 8: mod_base = OTHER; note = 2'-fluoro guanosine
  modified_base 9: mod_base = OTHER; note = 2'O-methyl uridine
  modified_base 10: mod_base = OTHER; note = 2'-fluoro uridine
  modified_base 11: mod_base = OTHER; note = 2'O-methyl cytidine
  modified_base 12: mod_base = OTHER; note = 2'-fluoro guanosine
  modified_base 13: mod_base = OTHER; note = 2'O-methyl uridine
  modified_base 14: mod_base = OTHER; note = 2'-fluoro guanosine
  modified_base 15: mod_base = OTHER; note = 2'O-methyl guanosine
  modified_base 16: mod_base = OTHER; note = 2'-fluoro adenosine
  modified_base 17: mod_base = OTHER; note = 2'O-methyl cytidine
  modified_base 18: mod_base = OTHER; note = 2'-fluoro uridine
  modified_base 19: mod_base = OTHER; note = 2'O-methyl uridine
  modified_base 20: mod_base = OTHER; note = 2'-fluoro guanosine
  modified_base 21: mod_base = OTHER; note = 2'O-methyl adenosine phosphorothioate
  modified_base 22: mod_base = OTHER; note = 2'O-methyl uridine phosphorothioate
  modified_base 23: mod_base = OTHER; note = 2'O-methyl uridine
gaagaaagttcgtggacttgatt

SEQ ID NO: 1888 - RNA, 23 nt, synthetic construct
  source 1..23: mol_type = other RNA
  modified_base 1: mod_base = OTHER; note = 5' vinyl phosphonate 2'O-methyl uridine phosphorothioate
  modified_base 2: mod_base = OTHER; note = 2'-fluoro guanosine phosphorothioate
  modified_base 3: mod_base = OTHER; note = 2'O-methyl adenosine
  modified_base 4: mod_base = OTHER; note = 2'-fluoro adenosine
  modified_base 5: mod_base = OTHER; note = 2'O-methyl guanosine
  modified_base 6: mod_base = OTHER; note = 2'-fluoro adenosine
  modified_base 7: mod_base = OTHER; note = 2'O-methyl adenosine
  modified_base 8: mod_base = OTHER; note = 2'-fluoro adenosine
  modified_base 9: mod_base = OTHER; note = 2'O-methyl guanosine
  modified_base 10: mod_base = OTHER; note = 2'-fluoro uridine
  modified_base 11: mod_base = OTHER; note = 2'O-methyl uridine
  modified_base 12: mod_base = OTHER; note = 2'-fluoro cytidine
  modified_base 13: mod_base = OTHER; note = 2'O-methyl guanosine
  modified_base 14: mod_base = OTHER; note = 2'-fluoro uridine
  modified_base 15: mod_base = OTHER; note = 2'O-methyl guanosine
  modified_base 16: mod_base = OTHER; note = 2'-fluoro guanosine
  modified_base 17: mod_base = OTHER; note = 2'O-methyl adenosine
  modified_base 18: mod_base = OTHER; note = 2'-fluoro cytidine
  modified_base 19: mod_base = OTHER; note = 2'O-methyl uridine
  modified_base 20: mod_base = OTHER; note = 2'-fluoro uridine
  modified_base 21: mod_base = OTHER; note = 2'O-methyl guanosine phosphorothioate
  modified_base 22: mod_base = OTHER; note = 2'O-methyl uridine phosphorothioate
  modified_base 23: mod_base = OTHER; note = 2'O-methyl uridine
tgaagaaagttcgtggacttgtt

SEQ ID NO: 1889 - RNA, 23 nt, synthetic construct
  source 1..23: mol_type = other RNA
  modified_base 1: mod_base = OTHER; note = 5' vinyl phosphonate 2'O-methyl adenosine phosphorothioate
  modified_base 2: mod_base = OTHER; note = 2'-fluoro uridine phosphorothioate
  modified_base 3: mod_base = OTHER; note = 2'O-methyl guanosine
  modified_base 4: mod_base = OTHER; note = 2'-fluoro adenosine
  modified_base 5: mod_base = OTHER; note = 2'O-methyl adenosine
  modified_base 6: mod_base = OTHER; note = 2'-fluoro guanosine
  modified_base 7: mod_base = OTHER; note = 2'O-methyl adenosine
  modified_base 8: mod_base = OTHER; note = 2'-fluoro adenosine
  modified_base 9: mod_base = OTHER; note = 2'O-methyl adenosine
  modified_base 10: mod_base = OTHER; note = 2'-fluoro guanosine
  modified_base 11: mod_base = OTHER; note = 2'O-methyl uridine
  modified_base 12: mod_base = OTHER; note = 2'-fluoro uridine
  modified_base 13: mod_base = OTHER; note = 2'O-methyl cytidine
  modified_base 14: mod_base = OTHER; note = 2'-fluoro guanosine
  modified_base 15: mod_base = OTHER; note = 2'O-methyl uridine
  modified_base 16: mod_base = OTHER; note = 2'-fluoro guanosine
  modified_base 17: mod_base = OTHER; note = 2'O-methyl guanosine
  modified_base 18: mod_base = OTHER; note = 2'-fluoro adenosine
  modified_base 19: mod_base = OTHER; note = 2'O-methyl cytidine
  modified_base 20: mod_base = OTHER; note = 2'-fluoro uridine
  modified_base 21: mod_base = OTHER; note = 2'O-methyl uridine phosphorothioate
  modified_base 22: mod_base = OTHER; note = 2'O-methyl uridine phosphorothioate
  modified_base 23: mod_base = OTHER; note = 2'O-methyl uridine
atgaagaaagttcgtggactttt

SEQ ID NO: 1890 - RNA, 23 nt, synthetic construct
  source 1..23: mol_type = other RNA
  modified_base 1: mod_base = OTHER; note = 5' vinyl phosphonate 2'O-methyl cytidine phosphorothioate
  modified_base 2: mod_base = OTHER; note = 2'-fluoro adenosine phosphorothioate
  modified_base 3: mod_base = OTHER; note = 2'O-methyl uridine
  modified_base 4: mod_base = OTHER; note = 2'-fluoro guanosine
  modified_base 5: mod_base = OTHER; note = 2'O-methyl adenosine
  modified_base 6: mod_base = OTHER; note = 2'-fluoro adenosine
  modified_base 7: mod_base = OTHER; note = 2'O-methyl guanosine
  modified_base 8: mod_base = OTHER; note = 2'-fluoro adenosine
  modified_base 9: mod_base = OTHER; note = 2'O-methyl adenosine
  modified_base 10: mod_base = OTHER; note = 2'-fluoro adenosine
  modified_base 11: mod_base = OTHER; note = 2'O-methyl guanosine
  modified_base 12: mod_base = OTHER; note = 2'-fluoro uridine
  modified_base 13: mod_base = OTHER; note = 2'O-methyl uridine
  modified_base 14: mod_base = OTHER; note = 2'-fluoro cytidine
  modified_base 15: mod_base = OTHER; note = 2'O-methyl guanosine
  modified_base 16: mod_base = OTHER; note = 2'-fluoro uridine
  modified_base 17: mod_base = OTHER; note = 2'O-methyl guanosine
  modified_base 18: mod_base = OTHER; note = 2'-fluoro guanosine
  modified_base 19: mod_base = OTHER; note = 2'O-methyl adenosine
  modified_base 20: mod_base = OTHER; note = 2'-fluoro cytidine
  modified_base 21: mod_base = OTHER; note = 2'O-methyl uridine phosphorothioate
  modified_base 22: mod_base = OTHER; note = 2'O-methyl uridine phosphorothioate
  modified_base 23: mod_base = OTHER; note = 2'O-methyl uridine
catgaagaaagttcgtggacttt

SEQ ID NO: 1891 - RNA, 23 nt, synthetic construct
  source 1..23: mol_type = other RNA
  modified_base 1: mod_base = OTHER; note = 5' vinyl phosphonate 2'O-methyl cytidine phosphorothioate
  modified_base 2: mod_base = OTHER; note = 2'-fluoro adenosine phosphorothioate
  modified_base 3: mod_base = OTHER; note = 2'O-methyl cytidine
  modified_base 4: mod_base = OTHER; note = 2'-fluoro adenosine
  modified_base 5: mod_base = OTHER; note = 2'O-methyl uridine
  modified_base 6: mod_base = OTHER; note = 2'-fluoro guanosine
  modified_base 7: mod_base = OTHER; note = 2'O-methyl adenosine
  modified_base 8: mod_base = OTHER; note = 2'-fluoro adenosine
  modified_base 9: mod_base = OTHER; note = 2'O-methyl guanosine
  modified_base 10: mod_base = OTHER; note = 2'-fluoro adenosine
  modified_base 11: mod_base = OTHER; note = 2'O-methyl adenosine
  modified_base 12: mod_base = OTHER; note = 2'-fluoro adenosine
  modified_base 13: mod_base = OTHER; note = 2'O-methyl guanosine
  modified_base 14: mod_base = OTHER; note = 2'-fluoro uridine
  modified_base 15: mod_base = OTHER; note = 2'O-methyl uridine
  modified_base 16: mod_base = OTHER; note = 2'-fluoro cytidine
  modified_base 17: mod_base = OTHER; note = 2'O-methyl guanosine
  modified_base 18: mod_base = OTHER; note = 2'-fluoro uridine
  modified_base 19: mod_base = OTHER; note = 2'O-methyl guanosine
  modified_base 20: mod_base = OTHER; note = 2'-fluoro guanosine
  modified_base 21: mod_base = OTHER; note = 2'O-methyl adenosine phosphorothioate
  modified_base 22: mod_base = OTHER; note = 2'O-methyl uridine phosphorothioate
  modified_base 23: mod_base = OTHER; note = 2'O-methyl uridine
cacatgaagaaagttcgtggatt

SEQ ID NO: 1892 - RNA, 23 nt, synthetic construct
  source 1..23: mol_type = other RNA
  modified_base 1: mod_base = OTHER; note = 5' vinyl phosphonate 2'O-methyl cytidine phosphorothioate
  modified_base 2: mod_base = OTHER; note = 2'-fluoro guanosine phosphorothioate
  modified_base 3: mod_base = OTHER; note = 2'O-methyl uridine
  modified_base 4: mod_base = OTHER; note = 2'-fluoro adenosine
  modified_base 5: mod_base = OTHER; note = 2'O-methyl guanosine
  modified_base 6: mod_base = OTHER; note = 2'-fluoro adenosine
  modified_base 7: mod_base = OTHER; note = 2'O-methyl cytidine
  modified_base 8: mod_base = OTHER; note = 2'-fluoro uridine
  modified_base 9: mod_base = OTHER; note = 2'O-methyl guanosine
  modified_base 10: mod_base = OTHER; note = 2'-fluoro adenosine
  modified_base 11: mod_base = OTHER; note = 2'O-methyl guanosine
  modified_base 12: mod_base = OTHER; note = 2'-fluoro cytidine
  modified_base 13: mod_base = OTHER; note = 2'O-methyl uridine
  modified_base 14: mod_base = OTHER; note = 2'-fluoro uridine
  modified_base 15: mod_base = OTHER; note = 2'O-methyl guanosine
  modified_base 16: mod_base = OTHER; note = 2'-fluoro guanosine
  modified_base 17: mod_base = OTHER; note = 2'O-methyl uridine
  modified_base 18: mod_base = OTHER; note = 2'-fluoro guanosine
  modified_base 19: mod_base = OTHER; note = 2'O-methyl adenosine
  modified_base 20: mod_base = OTHER; note = 2'-fluoro uridine
  modified_base 21: mod_base = OTHER; note = 2'O-methyl guanosine phosphorothioate
  modified_base 22: mod_base = OTHER; note = 2'O-methyl uridine phosphorothioate
  modified_base 23: mod_base = OTHER; note = 2'O-methyl uridine
cgtagactgagcttggtgatgtt

SEQ ID NO: 1893 - RNA, 23 nt, synthetic construct
  source 1..23: mol_type = other RNA
  modified_base 1: mod_base = OTHER; note = 5' vinyl phosphonate 2'O-methyl guanosine phosphorothioate
  modified_base 2: mod_base = OTHER; note = 2'-fluoro cytidine phosphorothioate
  modified_base 3: mod_base = OTHER; note = 2'O-methyl guanosine
  modified_base 4: mod_base = OTHER; note = 2'-fluoro uridine
  modified_base 5: mod_base = OTHER; note = 2'O-methyl adenosine
  modified_base 6: mod_base = OTHER; note = 2'-fluoro guanosine
  modified_base 7: mod_base = OTHER; note = 2'O-methyl adenosine
  modified_base 8: mod_base = OTHER; note = 2'-fluoro cytidine
  modified_base 9: mod_base = OTHER; note = 2'O-methyl uridine
  modified_base 10: mod_base = OTHER; note = 2'-fluoro guanosine
  modified_base 11: mod_base = OTHER; note = 2'O-methyl adenosine
  modified_base 12: mod_base = OTHER; note = 2'-fluoro guanosine
  modified_base 13: mod_base = OTHER; note = 2'O-methyl cytidine
  modified_base 14: mod_base = OTHER; note = 2'-fluoro uridine
  modified_base 15: mod_base = OTHER; note = 2'O-methyl uridine
  modified_base 16: mod_base = OTHER; note = 2'-fluoro guanosine
  modified_base 17: mod_base = OTHER; note = 2'O-methyl guanosine
  modified_base 18: mod_base = OTHER; note = 2'-fluoro uridine
  modified_base 19: mod_base = OTHER; note = 2'O-methyl guanosine
  modified_base 20: mod_base = OTHER; note = 2'-fluoro adenosine
  modified_base 21: mod_base = OTHER; note = 2'O-methyl uridine phosphorothioate
  modified_base 22: mod_base = OTHER; note = 2'O-methyl uridine phosphorothioate
  modified_base 23: mod_base = OTHER; note = 2'O-methyl uridine
gcgtagactgagcttggtgattt

SEQ ID NO: 1894 - RNA, 23 nt, synthetic construct
  source 1..23: mol_type = other RNA
  modified_base 1: mod_base = OTHER; note = 5' vinyl phosphonate 2'O-methyl guanosine phosphorothioate
  modified_base 2: mod_base = OTHER; note = 2'-fluoro guanosine phosphorothioate
  modified_base 3: mod_base = OTHER; note = 2'O-methyl cytidine
  modified_base 4: mod_base = OTHER; note = 2'-fluoro guanosine
  modified_base 5: mod_base = OTHER; note = 2'O-methyl uridine
  modified_base 6: mod_base = OTHER; note = 2'-fluoro adenosine
  modified_base 7: mod_base = OTHER; note = 2'O-methyl guanosine
  modified_base 8: mod_base = OTHER; note = 2'-fluoro adenosine
  modified_base 9: mod_base = OTHER; note = 2'O-methyl cytidine
  modified_base 10: mod_base = OTHER; note = 2'-fluoro uridine
  modified_base 11: mod_base = OTHER; note = 2'O-methyl guanosine
  modified_base 12: mod_base = OTHER; note = 2'-fluoro adenosine
  modified_base 13: mod_base = OTHER; note = 2'O-methyl guanosine
  modified_base 14: mod_base = OTHER; note = 2'-fluoro cytidine
  modified_base 15: mod_base = OTHER; note = 2'O-methyl uridine
  modified_base 16: mod_base = OTHER; note = 2'-fluoro uridine
  modified_base 17: mod_base = OTHER; note = 2'O-methyl guanosine
  modified_base 18: mod_base = OTHER; note = 2'-fluoro guanosine
  modified_base 19: mod_base = OTHER; note = 2'O-methyl uridine
  modified_base 20: mod_base = OTHER; note = 2'-fluoro guanosine
  modified_base 21: mod_base = OTHER; note = 2'O-methyl adenosine phosphorothioate
  modified_base 22: mod_base = OTHER; note = 2'O-methyl uridine phosphorothioate
  modified_base 23: mod_base = OTHER; note = 2'O-methyl uridine
ggcgtagactgagcttggtgatt

SEQ ID NO: 1895 - RNA, 23 nt, synthetic construct
  source 1..23: mol_type = other RNA
  modified_base 1: mod_base = OTHER; note = 5' vinyl phosphonate 2'O-methyl adenosine phosphorothioate
  modified_base 2: mod_base = OTHER; note = 2'-fluoro guanosine phosphorothioate
  modified_base 3: mod_base = OTHER; note = 2'O-methyl guanosine
  modified_base 4: mod_base = OTHER; note = 2'-fluoro cytidine
  modified_base 5: mod_base = OTHER; note = 2'O-methyl guanosine
  modified_base 6: mod_base = OTHER; note = 2'-fluoro uridine
  modified_base 7: mod_base = OTHER; note = 2'O-methyl adenosine
  modified_base 8: mod_base = OTHER; note = 2'-fluoro guanosine
  modified_base 9: mod_base = OTHER; note = 2'O-methyl adenosine
  modified_base 10: mod_base = OTHER; note = 2'-fluoro cytidine
  modified_base 11: mod_base = OTHER; note = 2'O-methyl uridine
  modified_base 12: mod_base = OTHER; note = 2'-fluoro guanosine
  modified_base 13: mod_base = OTHER; note = 2'O-methyl adenosine
  modified_base 14: mod_base = OTHER; note = 2'-fluoro guanosine
  modified_base 15: mod_base = OTHER; note = 2'O-methyl cytidine
  modified_base 16: mod_base = OTHER; note = 2'-fluoro uridine
  modified_base 17: mod_base = OTHER; note = 2'O-methyl uridine
  modified_base 18: mod_base = OTHER; note = 2'-fluoro guanosine
  modified_base 19: mod_base = OTHER; note = 2'O-methyl guanosine
  modified_base 20: mod_base = OTHER; note = 2'-fluoro uridine
  modified_base 21: mod_base = OTHER; note = 2'O-methyl guanosine phosphorothioate
  modified_base 22: mod_base = OTHER; note = 2'O-methyl uridine phosphorothioate
  modified_base 23: mod_base = OTHER; note = 2'O-methyl uridine
aggcgtagactgagcttggtgtt

SEQ ID NO: 1896 - RNA, 23 nt, synthetic construct
  source 1..23: mol_type = other RNA
  modified_base 1: mod_base = OTHER; note = 5' vinyl phosphonate 2'O-methyl guanosine phosphorothioate
  modified_base 2: mod_base = OTHER; note = 2'-fluoro adenosine phosphorothioate
  modified_base 3: mod_base = OTHER; note = 2'O-methyl guanosine
  modified_base 4: mod_base = OTHER; note = 2'-fluoro guanosine
  modified_base 5: mod_base = OTHER; note = 2'O-methyl cytidine
  modified_base 6: mod_base = OTHER; note = 2'-fluoro guanosine
  modified_base 7: mod_base = OTHER; note = 2'O-methyl uridine
  modified_base 8: mod_base = OTHER; note = 2'-fluoro adenosine
  modified_base 9: mod_base = OTHER; note = 2'O-methyl guanosine
  modified_base 10: mod_base = OTHER; note = 2'-fluoro adenosine
  modified_base 11: mod_base = OTHER; note = 2'O-methyl cytidine
  modified_base 12: mod_base = OTHER; note = 2'-fluoro uridine
  modified_base 13: mod_base = OTHER; note = 2'O-methyl guanosine
  modified_base 14: mod_base = OTHER; note = 2'-fluoro adenosine
  modified_base 15: mod_base = OTHER; note = 2'O-methyl guanosine
  modified_base 16: mod_base = OTHER; note = 2'-fluoro cytidine
  modified_base 17: mod_base = OTHER; note = 2'O-methyl uridine
  modified_base 18: mod_base = OTHER; note = 2'-fluoro uridine
  modified_base 19: mod_base = OTHER; note = 2'O-methyl guanosine
  modified_base 20: mod_base = OTHER; note = 2'-fluoro guanosine
  modified_base 21: mod_base = OTHER; note = 2'O-methyl uridine phosphorothioate
  modified_base 22: mod_base = OTHER; note = 2'O-methyl uridine phosphorothioate
  modified_base 23: mod_base = OTHER; note = 2'O-methyl uridine
gaggcgtagactgagcttggttt

SEQ ID NO: 1897 - RNA, 23 nt, synthetic construct
  source 1..23: mol_type = other RNA
  modified_base 1: mod_base = OTHER; note = 5' vinyl phosphonate 2'O-methyl adenosine phosphorothioate
  modified_base 2: mod_base = OTHER; note = 2'-fluoro guanosine phosphorothioate
  modified_base 3: mod_base = OTHER; note = 2'O-methyl adenosine
  modified_base 4: mod_base = OTHER; note = 2'-fluoro guanosine
  modified_base 5: mod_base = OTHER; note = 2'O-methyl guanosine
  modified_base 6: mod_base = OTHER; note = 2'-fluoro cytidine
  modified_base 7: mod_base = OTHER; note = 2'O-methyl guanosine
  modified_base 8: mod_base = OTHER; note = 2'-fluoro uridine
  modified_base 9: mod_base = OTHER; note = 2'O-methyl adenosine
  modified_base 10: mod_base = OTHER; note = 2'-fluoro guanosine
  modified_base 11: mod_base = OTHER; note = 2'O-methyl adenosine
  modified_base 12: mod_base = OTHER; note = 2'-fluoro cytidine
  modified_base 13: mod_base = OTHER; note = 2'O-methyl uridine
  modified_base 14: mod_base = OTHER; note = 2'-fluoro guanosine
  modified_base 15: mod_base = OTHER; note = 2'O-methyl adenosine
  modified_base 16: mod_base = OTHER; note = 2'-fluoro guanosine
  modified_base 17: mod_base = OTHER; note = 2'O-methyl cytidine
  modified_base 18: mod_base = OTHER; note = 2'-fluoro uridine
  modified_base 19: mod_base = OTHER; note = 2'O-methyl uridine
  modified_base 20: mod_base = OTHER; note = 2'-fluoro guanosine
  modified_base 21: mod_base = OTHER; note = 2'O-methyl guanosine phosphorothioate
  modified_base 22: mod_base = OTHER; note = 2'O-methyl uridine phosphorothioate
  modified_base 23: mod_base = OTHER; note = 2'O-methyl uridine
agaggcgtagactgagcttggtt

SEQ ID NO: 1898 - RNA, 23 nt, synthetic construct
  source 1..23: mol_type = other RNA
  modified_base 1: mod_base = OTHER; note = 5' vinyl phosphonate 2'O-methyl cytidine phosphorothioate
  modified_base 2: mod_base = OTHER; note = 2'-fluoro adenosine phosphorothioate
  modified_base 3: mod_base = OTHER; note = 2'O-methyl guanosine
  modified_base 4: mod_base = OTHER; note = 2'-fluoro adenosine
  modified_base 5: mod_base = OTHER; note = 2'O-methyl guanosine
  modified_base 6: mod_base = OTHER; note = 2'-fluoro guanosine
  modified_base 7: mod_base = OTHER; note = 2'O-methyl cytidine
  modified_base 8: mod_base = OTHER; note = 2'-fluoro guanosine
  modified_base 9: mod_base = OTHER; note = 2'O-methyl uridine
  modified_base 10: mod_base = OTHER; note = 2'-fluoro adenosine
  modified_base 11: mod_base = OTHER; note = 2'O-methyl guanosine
  modified_base 12: mod_base = OTHER; note = 2'-fluoro adenosine
  modified_base 13: mod_base = OTHER; note = 2'O-methyl cytidine
  modified_base 14: mod_base = OTHER; note = 2'-fluoro uridine
  modified_base 15: mod_base = OTHER; note = 2'O-methyl guanosine
  modified_base 16: mod_base = OTHER; note = 2'-fluoro adenosine
  modified_base 17: mod_base = OTHER; note = 2'O-methyl guanosine
  modified_base 18: mod_base = OTHER; note = 2'-fluoro cytidine
  modified_base 19: mod_base = OTHER; note = 2'O-methyl uridine
  modified_base 20: mod_base = OTHER; note = 2'-fluoro uridine
  modified_base 21: mod_base = OTHER; note = 2'O-methyl guanosine phosphorothioate
  modified_base 22: mod_base = OTHER; note = 2'O-methyl uridine phosphorothioate
  modified_base 23: mod_base = OTHER; note = 2'O-methyl uridine
cagaggcgtagactgagcttgtt

SEQ ID NO: 1899 - RNA, 23 nt, synthetic construct
  source 1..23: mol_type = other RNA
  modified_base 1: mod_base = OTHER; note = 5' vinyl phosphonate 2'O-methyl uridine phosphorothioate
  modified_base 2: mod_base = OTHER; note = 2'-fluoro guanosine phosphorothioate
  modified_base 3: mod_base = OTHER; note = 2'O-methyl uridine
  modified_base 4: mod_base = OTHER; note = 2'-fluoro guanosine
  modified_base 5: mod_base = OTHER; note = 2'O-methyl cytidine
  modified_base 6: mod_base = OTHER; note = 2'-fluoro adenosine
  modified_base 7: mod_base = OTHER; note = 2'O-methyl guanosine
  modified_base 8: mod_base = OTHER; note = 2'-fluoro adenosine
  modified_base 9: mod_base = OTHER; note = 2'O-methyl guanosine
  modified_base 10: mod_base = OTHER; note = 2'-fluoro guanosine
  modified_base 11: mod_base = OTHER; note = 2'O-methyl cytidine
  modified_base 12: mod_base = OTHER; note = 2'-fluoro guanosine
  modified_base 13: mod_base = OTHER; note = 2'O-methyl uridine
  modified_base 14: mod_base = OTHER; note = 2'-fluoro adenosine
  modified_base 15: mod_base = OTHER; note = 2'O-methyl guanosine
  modified_base 16: mod_base = OTHER; note = 2'-fluoro adenosine
  modified_base 17: mod_base = OTHER; note = 2'O-methyl cytidine
  modified_base 18: mod_base = OTHER; note = 2'-fluoro uridine
  modified_base 19: mod_base = OTHER; note = 2'O-methyl guanosine
  modified_base 20: mod_base = OTHER; note = 2'-fluoro adenosine
  modified_base 21: mod_base = OTHER; note = 2'O-methyl guanosine phosphorothioate
  modified_base 22: mod_base = OTHER; note = 2'O-methyl uridine phosphorothioate
  modified_base 23: mod_base = OTHER; note = 2'O-methyl uridine
tgtgcagaggcgtagactgagtt

SEQ ID NO: 1900 - RNA, 23 nt, synthetic construct
  source 1..23: mol_type = other RNA
  modified_base 1: mod_base = OTHER; note = 5' vinyl phosphonate 2'O-methyl cytidine phosphorothioate
  modified_base 2: mod_base = OTHER; note = 2'-fluoro uridine phosphorothioate
  modified_base 3: mod_base = OTHER; note = 2'O-methyl guanosine
  modified_base 4: mod_base = OTHER; note = 2'-fluoro uridine
  modified_base 5: mod_base = OTHER; note = 2'O-methyl guanosine
  modified_base 6: mod_base = OTHER; note = 2'-fluoro cytidine
  modified_base 7: mod_base = OTHER; note = 2'O-methyl adenosine
  modified_base 8: mod_base = OTHER; note = 2'-fluoro guanosine
  modified_base 9: mod_base = OTHER; note = 2'O-methyl adenosine
  modified_base 10: mod_base = OTHER; note = 2'-fluoro guanosine
  modified_base 11: mod_base = OTHER; note = 2'O-methyl guanosine
  modified_base 12: mod_base = OTHER; note = 2'-fluoro cytidine
  modified_base 13: mod_base = OTHER; note = 2'O-methyl guanosine
  modified_base 14: mod_base = OTHER; note = 2'-fluoro uridine
  modified_base 15: mod_base = OTHER; note = 2'O-methyl adenosine
  modified_base 16: mod_base = OTHER; note = 2'-fluoro guanosine
  modified_base 17: mod_base = OTHER; note = 2'O-methyl adenosine
  modified_base 18: mod_base = OTHER; note = 2'-fluoro cytidine
  modified_base 19: mod_base = OTHER; note = 2'O-methyl uridine
  modified_base 20: mod_base = OTHER; note = 2'-fluoro guanosine
  modified_base 21: mod_base = OTHER; note = 2'O-methyl adenosine phosphorothioate
  modified_base 22: mod_base = OTHER; note = 2'O-methyl uridine phosphorothioate
  modified_base 23: mod_base = OTHER; note = 2'O-methyl uridine
ctgtgcagaggcgtagactgatt

SEQ ID NO: 1901 - RNA, 23 nt, synthetic construct
  source 1..23: mol_type = other RNA
  modified_base 1: mod_base = OTHER; note = 5' vinyl phosphonate 2'O-methyl cytidine phosphorothioate
  modified_base 2: mod_base = OTHER; note = 2'-fluoro cytidine phosphorothioate
  modified_base 3: mod_base = OTHER; note = 2'O-methyl uridine
  modified_base 4: mod_base = OTHER; note = 2'-fluoro guanosine
  modified_base 5: mod_base = OTHER; note = 2'O-methyl uridine
  modified_base 6: mod_base = OTHER; note = 2'-fluoro guanosine
  modified_base 7: mod_base = OTHER; note = 2'O-methyl cytidine
  modified_base 8: mod_base = OTHER; note = 2'-fluoro adenosine
  modified_base 9: mod_base = OTHER; note = 2'O-methyl guanosine
  modified_base 10: mod_base = OTHER; note = 2'-fluoro adenosine
  modified_base 11: mod_base = OTHER; note = 2'O-methyl guanosine
  modified_base 12: mod_base = OTHER; note = 2'-fluoro guanosine
  modified_base 13: mod_base = OTHER; note = 2'O-methyl cytidine
  modified_base 14: mod_base = OTHER; note = 2'-fluoro guanosine
  modified_base 15: mod_base = OTHER; note = 2'O-methyl uridine
  modified_base 16: mod_base = OTHER; note = 2'-fluoro adenosine
  modified_base 17: mod_base = OTHER; note = 2'O-methyl guanosine
  modified_base 18: mod_base = OTHER; note = 2'-fluoro adenosine
  modified_base 19: mod_base = OTHER; note = 2'O-methyl cytidine
  modified_base 20: mod_base = OTHER; note = 2'-fluoro uridine
  modified_base 21: mod_base = OTHER; note = 2'O-methyl guanosine phosphorothioate
  modified_base 22: mod_base = OTHER; note = 2'O-methyl uridine phosphorothioate
  modified_base 23: mod_base = OTHER; note = 2'O-methyl uridine
cctgtgcagaggcgtagactgtt

SEQ ID NO: 1902 - RNA, 23 nt, synthetic construct
  source 1..23: mol_type = other RNA
  modified_base 1: mod_base = OTHER; note = 5' vinyl phosphonate 2'O-methyl adenosine phosphorothioate
  modified_base 2: mod_base = OTHER; note = 2'-fluoro guanosine phosphorothioate
  modified_base 3: mod_base = OTHER; note = 2'O-methyl guanosine
  modified_base 4: mod_base = OTHER; note = 2'-fluoro uridine
  modified_base 5: mod_base = OTHER; note = 2'O-methyl uridine
  modified_base 6: mod_base = OTHER; note = 2'-fluoro cytidine
  modified_base 7: mod_base = OTHER; note = 2'O-methyl cytidine
  modified_base 8: mod_base = OTHER; note = 2'-fluoro cytidine
  modified_base 9: mod_base = OTHER; note = 2'O-methyl uridine
  modified_base 10: mod_base = OTHER; note = 2'-fluoro guanosine
  modified_base 11: mod_base = OTHER; note = 2'O-methyl uridine
  modified_base 12: mod_base = OTHER; note = 2'-fluoro guanosine
  modified_base 13: mod_base = OTHER; note = 2'O-methyl cytidine
  modified_base 14: mod_base = OTHER; note = 2'-fluoro adenosine
  modified_base 15: mod_base = OTHER; note = 2'O-methyl guanosine
  modified_base 16: mod_base = OTHER; note = 2'-fluoro adenosine
  modified_base 17: mod_base = OTHER; note = 2'O-methyl guanosine
  modified_base 18: mod_base = OTHER; note = 2'-fluoro guanosine
  modified_base 19: mod_base = OTHER; note = 2'O-methyl cytidine
  modified_base 20: mod_base = OTHER; note = 2'-fluoro guanosine
  modified_base 21: mod_base = OTHER; note = 2'O-methyl uridine phosphorothioate
  modified_base 22: mod_base = OTHER; note = 2'O-methyl uridine phosphorothioate
  modified_base 23: mod_base = OTHER; note = 2'O-methyl uridine
aggttccctgtgcagaggcgttt

SEQ ID NO: 1903 - RNA, 23 nt, synthetic construct
  source 1..23: mol_type = other RNA
  modified_base 1: mod_base = OTHER; note = 5' vinyl phosphonate 2'O-methyl guanosine phosphorothioate
  modified_base 2: mod_base = OTHER; note = 2'-fluoro adenosine phosphorothioate
  modified_base 3: mod_base = OTHER; note = 2'O-methyl guanosine
  modified_base 4: mod_base = OTHER; note = 2'-fluoro guanosine
  modified_base 5: mod_base = OTHER; note = 2'O-methyl uridine
  modified_base 6: mod_base = OTHER; note = 2'-fluoro uridine
  modified_base 7: mod_base = OTHER; note = 2'O-methyl cytidine
  modified_base 8: mod_base = OTHER; note = 2'-fluoro cytidine
  modified_base 9: mod_base = OTHER; note = 2'O-methyl cytidine
  modified_base 10: mod_base = OTHER; note = 2'-fluoro uridine
  modified_base 11: mod_base = OTHER; note = 2'O-methyl guanosine
  modified_base 12: mod_base = OTHER; note = 2'-fluoro uridine
  modified_base 13: mod_base = OTHER; note = 2'O-methyl guanosine
  modified_base 14: mod_base = OTHER; note = 2'-fluoro cytidine
  modified_base 15: mod_base = OTHER; note = 2'O-methyl adenosine
  modified_base 16: mod_base = OTHER; note = 2'-fluoro guanosine
  modified_base 17: mod_base = OTHER; note = 2'O-methyl adenosine
  modified_base 18: mod_base = OTHER; note = 2'-fluoro guanosine
  modified_base 19: mod_base = OTHER; note = 2'O-methyl guanosine
  modified_base 20: mod_base = OTHER; note = 2'-fluoro cytidine
  modified_base 21: mod_base = OTHER; note = 2'O-methyl guanosine phosphorothioate
  modified_base 22: mod_base = OTHER; note = 2'O-methyl uridine phosphorothioate
  modified_base 23: mod_base = OTHER; note = 2'O-methyl uridine
gaggttccctgtgcagaggcgtt

SEQ ID NO: 1904 - RNA, 23 nt, synthetic construct
  source 1..23: mol_type = other RNA
  modified_base 1: mod_base = OTHER; note = 5' vinyl phosphonate 2'O-methyl adenosine phosphorothioate
  modified_base 2: mod_base = OTHER; note = 2'-fluoro guanosine phosphorothioate
  modified_base 3: mod_base = OTHER; note = 2'O-methyl adenosine
  modified_base 4: mod_base = OTHER; note = 2'-fluoro guanosine
  modified_base 5: mod_base = OTHER; note = 2'O-methyl guanosine
  modified_base 6: mod_base = OTHER; note = 2'-fluoro uridine
  modified_base 7: mod_base = OTHER; note = 2'O-methyl uridine
  modified_base 8: mod_base = OTHER; note = 2'-fluoro cytidine
  modified_base 9: mod_base = OTHER; note = 2'O-methyl cytidine
  modified_base 10: mod_base = OTHER; note = 2'-fluoro cytidine
  modified_base 11: mod_base = OTHER; note = 2'O-methyl uridine
  modified_base 12: mod_base = OTHER; note = 2'-fluoro guanosine
  modified_base 13: mod_base = OTHER; note = 2'O-methyl uridine
  modified_base 14: mod_base = OTHER; note = 2'-fluoro guanosine
  modified_base 15: mod_base = OTHER; note = 2'O-methyl cytidine
  modified_base 16: mod_base = OTHER; note = 2'-fluoro adenosine
  modified_base 17: mod_base = OTHER; note = 2'O-methyl guanosine
  modified_base 18: mod_base = OTHER; note = 2'-fluoro adenosine
  modified_base 19: mod_base = OTHER; note = 2'O-methyl guanosine
  modified_base 20: mod_base = OTHER; note = 2'-fluoro guanosine
  modified_base 21: mod_base = OTHER; note = 2'O-methyl cytidine phosphorothioate
  modified_base 22: mod_base = OTHER; note = 2'O-methyl uridine phosphorothioate
  modified_base 23: mod_base = OTHER; note = 2'O-methyl uridine
agaggttccctgtgcagaggctt

SEQ ID NO: 1905 - RNA, 23 nt, synthetic construct
  source 1..23: mol_type = other RNA
  modified_base 1: mod_base = OTHER; note = 5' vinyl phosphonate 2'O-methyl guanosine phosphorothioate
  modified_base 2: mod_base = OTHER; note = 2'-fluoro uridine phosphorothioate
  modified_base 3: mod_base = OTHER; note = 2'O-methyl adenosine
  modified_base 4: mod_base = OTHER; note = 2'-fluoro guanosine
  modified_base 5: mod_base = OTHER; note = 2'O-methyl adenosine
  modified_base 6: mod_base = OTHER; note = 2'-fluoro guanosine
  modified_base 7: mod_base = OTHER; note = 2'O-methyl guanosine
  modified_base 8: mod_base = OTHER; note = 2'-fluoro uridine
  modified_base 9: mod_base = OTHER; note = 2'O-methyl uridine
  modified_base 10: mod_base = OTHER; note = 2'-fluoro cytidine
  modified_base 11: mod_base = OTHER; note = 2'O-methyl cytidine
  modified_base 12: mod_base = OTHER; note = 2'-fluoro cytidine
  modified_base 13: mod_base = OTHER; note = 2'O-methyl uridine
  modified_base 14: mod_base = OTHER; note = 2'-fluoro guanosine
  modified_base 15: mod_base = OTHER; note = 2'O-methyl uridine
  modified_base 16: mod_base = OTHER; note = 2'-fluoro guanosine
  modified_base 17: mod_base = OTHER; note = 2'O-methyl cytidine
  modified_base 18: mod_base = OTHER; note = 2'-fluoro adenosine
  modified_base 19: mod_base = OTHER; note = 2'O-methyl guanosine
  modified_base 20: mod_base = OTHER; note = 2'-fluoro adenosine
  modified_base 21: mod_base = OTHER; note = 2'O-methyl guanosine phosphorothioate
  modified_base 22: mod_base = OTHER; note = 2'O-methyl uridine phosphorothioate
  modified_base 23: mod_base = OTHER; note = 2'O-methyl uridine
gtagaggttccctgtgcagagtt

SEQ ID NO: 1906 - RNA, 23 nt, synthetic construct
  source 1..23: mol_type = other RNA
  modified_base 1: mod_base = OTHER; note = 5' vinyl phosphonate 2'O-methyl guanosine phosphorothioate
  modified_base 2: mod_base = OTHER; note = 2'-fluoro guanosine phosphorothioate
  modified_base 3: mod_base = OTHER; note = 2'O-methyl uridine
  modified_base 4: mod_base = OTHER; note = 2'-fluoro adenosine
  modified_base 5: mod_base = OTHER; note = 2'O-methyl guanosine
  modified_base 6: mod_base = OTHER; note = 2'-fluoro adenosine
  modified_base 7: mod_base = OTHER; note = 2'O-methyl guanosine
  modified_base 8: mod_base = OTHER; note = 2'-fluoro guanosine
  modified_base 9: mod_base = OTHER; note = 2'O-methyl uridine
  modified_base 10: mod_base = OTHER; note = 2'-fluoro uridine
  modified_base 11: mod_base = OTHER; note = 2'O-methyl cytidine
  modified_base 12: mod_base = OTHER; note = 2'-fluoro cytidine
  modified_base 13: mod_base = OTHER; note = 2'O-methyl cytidine
  modified_base 14: mod_base = OTHER; note = 2'-fluoro uridine
  modified_base 15: mod_base = OTHER; note = 2'O-methyl guanosine
  modified_base 16: mod_base = OTHER; note = 2'-fluoro uridine
  modified_base 17: mod_base = OTHER; note = 2'O-methyl guanosine
  modified_base 18: mod_base = OTHER; note = 2'-fluoro cytidine
  modified_base 19: mod_base = OTHER; note = 2'O-methyl adenosine
  modified_base 20: mod_base = OTHER; note = 2'-fluoro guanosine
  modified_base 21: mod_base = OTHER; note = 2'O-methyl adenosine phosphorothioate
  modified_base 22: mod_base = OTHER; note = 2'O-methyl uridine phosphorothioate
  modified_base 23: mod_base = OTHER; note = 2'O-methyl uridine
ggtagaggttccctgtgcagatt

SEQ ID NO: 1907 - RNA, 23 nt, synthetic construct
  source 1..23: mol_type = other RNA
  modified_base 1: mod_base = OTHER; note = 5' vinyl phosphonate 2'O-methyl guanosine phosphorothioate
  modified_base 2: mod_base = OTHER; note = 2'-fluoro adenosine phosphorothioate
  modified_base 3: mod_base = OTHER; note = 2'O-methyl adenosine
  modified_base 4: mod_base = OTHER; note = 2'-fluoro guanosine
  modified_base 5: mod_base = OTHER; note = 2'O-methyl guanosine
  modified_base 6: mod_base = OTHER; note = 2'-fluoro uridine
  modified_base 7: mod_base = OTHER; note = 2'O-methyl adenosine
  modified_base 8: mod_base = OTHER; note = 2'-fluoro guanosine
  modified_base 9: mod_base = OTHER; note = 2'O-methyl adenosine
  modified_base 10: mod_base = OTHER; note = 2'-fluoro guanosine
  modified_base 11: mod_base = OTHER; note = 2'O-methyl guanosine
  modified_base 12: mod_base = OTHER; note = 2'-fluoro uridine
  modified_base 13: mod_base = OTHER; note = 2'O-methyl uridine
  modified_base 14: mod_base = OTHER; note = 2'-fluoro cytidine
  modified_base 15: mod_base = OTHER; note = 2'O-methyl cytidine
  modified_base 16: mod_base = OTHER; note = 2'-fluoro cytidine
  modified_base 17: mod_base = OTHER; note = 2'O-methyl uridine
  modified_base 18: mod_base = OTHER; note = 2'-fluoro guanosine
  modified_base 19: mod_base = OTHER; note = 2'O-methyl uridine
  modified_base 20: mod_base = OTHER; note = 2'-fluoro guanosine
  modified_base 21: mod_base = OTHER; note = 2'O-methyl cytidine phosphorothioate
  modified_base 22: mod_base = OTHER; note = 2'O-methyl uridine phosphorothioate
  modified_base 23: mod_base = OTHER; note = 2'O-methyl uridine
gaaggtagaggttccctgtgctt

SEQ ID NO: 1908 - RNA, 23 nt, synthetic construct
  source 1..23: mol_type = other RNA
  modified_base 1: mod_base = OTHER; note = 5' vinyl phosphonate 2'O-methyl adenosine phosphorothioate
  modified_base 2: mod_base = OTHER; note = 2'-fluoro guanosine phosphorothioate
  modified_base 3: mod_base = OTHER; note = 2'O-methyl adenosine
  modified_base 4: mod_base = OTHER; note = 2'-fluoro adenosine
  modified_base 5: mod_base = OTHER; note = 2'O-methyl guanosine
  modified_base 6: mod_base = OTHER; note = 2'-fluoro guanosine
  modified_base 7: mod_base = OTHER; note = 2'O-methyl uridine
  modified_base 8: mod_base = OTHER; note = 2'-fluoro adenosine
  modified_base 9: mod_base = OTHER; note = 2'O-methyl guanosine
  modified_base 10: mod_base = OTHER; note = 2'-fluoro adenosine
  modified_base 11: mod_base = OTHER; note = 2'O-methyl guanosine
  modified_base 12: mod_base = OTHER; note = 2'-fluoro guanosine
  modified_base 13: mod_base = OTHER; note = 2'O-methyl uridine
  modified_base 14: mod_base = OTHER; note = 2'-fluoro uridine
  modified_base 15: mod_base = OTHER; note = 2'O-methyl cytidine
  modified_base 16: mod_base = OTHER; note = 2'-fluoro cytidine
  modified_base 17: mod_base = OTHER; note = 2'O-methyl cytidine
  modified_base 18: mod_base = OTHER; note = 2'-fluoro uridine
  modified_base 19: mod_base = OTHER; note = 2'O-methyl guanosine
  modified_base 20: mod_base = OTHER; note = 2'-fluoro uridine
  modified_base 21: mod_base = OTHER; note = 2'O-methyl guanosine phosphorothioate
  modified_base 22: mod_base = OTHER; note = 2'O-methyl uridine phosphorothioate
  modified_base 23: mod_base = OTHER; note = 2'O-methyl uridine
agaaggtagaggttccctgtgtt

SEQ ID NO: 1909 - RNA, 23 nt, synthetic construct
  source 1..23: mol_type = other RNA
  modified_base 1: mod_base = OTHER; note = 5' vinyl phosphonate 2'O-methyl guanosine phosphorothioate
  modified_base 2: mod_base = OTHER; note = 2'-fluoro cytidine phosphorothioate
  modified_base 3: mod_base = OTHER; note = 2'O-methyl adenosine
  modified_base 4: mod_base = OTHER; note = 2'-fluoro uridine
  modified_base 5: mod_base = OTHER; note = 2'O-methyl adenosine
  modified_base 6: mod_base = OTHER; note = 2'-fluoro uridine
  modified_base 7: mod_base = OTHER; note = 2'O-methyl cytidine
  modified_base 8: mod_base = OTHER; note = 2'-fluoro uridine
  modified_base 9: mod_base = OTHER; note = 2'O-methyl cytidine
  modified_base 10: mod_base = OTHER; note = 2'-fluoro uridine
  modified_base 11: mod_base = OTHER; note = 2'O-methyl cytidine
  modified_base 12: mod_base = OTHER; note = 2'-fluoro cytidine
  modified_base 13: mod_base = OTHER; note = 2'O-methyl cytidine
  modified_base 14: mod_base = OTHER; note = 2'-fluoro adenosine
  modified_base 15: mod_base = OTHER; note = 2'O-methyl guanosine
  modified_base 16: mod_base = OTHER; note = 2'-fluoro cytidine
  modified_base 17: mod_base = OTHER; note = 2'O-methyl adenosine
  modified_base 18: mod_base = OTHER; note = 2'-fluoro cytidine
  modified_base 19: mod_base = OTHER; note = 2'O-methyl cytidine
  modified_base 20: mod_base = OTHER; note = 2'-fluoro uridine
  modified_base 21: mod_base = OTHER; note = 2'O-methyl uridine phosphorothioate
  modified_base 22: mod_base = OTHER; note = 2'O-methyl uridine phosphorothioate
  modified_base 23: mod_base = OTHER; note = 2'O-methyl uridine
gcatatctctcccagcacctttt

SEQ ID NO: 1910 - RNA, 23 nt, synthetic construct
  source 1..23: mol_type = other RNA
  modified_base 1: mod_base = OTHER; note = 5' vinyl phosphonate 2'O-methyl guanosine phosphorothioate
  modified_base 2: mod_base = OTHER; note = 2'-fluoro guanosine phosphorothioate
  modified_base 3: mod_base = OTHER; note = 2'O-methyl cytidine
  modified_base 4: mod_base = OTHER; note = 2'-fluoro adenosine
  modified_base 5: mod_base = OTHER; note = 2'O-methyl uridine
  modified_base 6: mod_base = OTHER; note = 2'-fluoro adenosine
  modified_base 7: mod_base = OTHER; note = 2'O-methyl uridine
  modified_base 8: mod_base = OTHER; note = 2'-fluoro cytidine
  modified_base 9: mod_base = OTHER; note = 2'O-methyl uridine
  modified_base 10: mod_base = OTHER; note = 2'-fluoro cytidine
  modified_base 11: mod_base = OTHER; note = 2'O-methyl uridine
  modified_base 12: mod_base = OTHER; note = 2'-fluoro cytidine
  modified_base 13: mod_base = OTHER; note = 2'O-methyl cytidine
  modified_base 14: mod_base = OTHER; note = 2'-fluoro cytidine
  modified_base 15: mod_base = OTHER; note = 2'O-methyl adenosine
  modified_base 16: mod_base = OTHER; note = 2'-fluoro guanosine
  modified_base 17: mod_base = OTHER; note = 2'O-methyl cytidine
  modified_base 18: mod_base = OTHER; note = 2'-fluoro adenosine
  modified_base 19: mod_base = OTHER; note = 2'O-methyl cytidine
  modified_base 20: mod_base = OTHER; note = 2'-fluoro cytidine
  modified_base 21: mod_base = OTHER; note = 2'O-methyl uridine phosphorothioate
  modified_base 22: mod_base = OTHER; note = 2'O-methyl uridine phosphorothioate
  modified_base 23: mod_base = OTHER; note = 2'O-methyl uridine
ggcatatctctcccagcaccttt

SEQ ID NO: 1911 - RNA, 23 nt, synthetic construct
  source 1..23: mol_type = other RNA
  modified_base 1: mod_base = OTHER; note = 5' vinyl phosphonate 2'O-methyl adenosine phosphorothioate
  modified_base 2: mod_base = OTHER; note = 2'-fluoro guanosine phosphorothioate
  modified_base 3: mod_base = OTHER; note = 2'O-methyl guanosine
  modified_base 4: mod_base = OTHER; note = 2'-fluoro cytidine
  modified_base 5: mod_base = OTHER; note = 2'O-methyl adenosine
  modified_base 6: mod_base = OTHER; note = 2'-fluoro uridine
  modified_base 7: mod_base = OTHER; note = 2'O-methyl adenosine
  modified_base 8: mod_base = OTHER; note = 2'-fluoro uridine
  modified_base 9: mod_base = OTHER; note = 2'O-methyl cytidine
  modified_base 10: mod_base = OTHER; note = 2'-fluoro uridine
  modified_base 11: mod_base = OTHER; note = 2'O-methyl cytidine
  modified_base 12: mod_base = OTHER; note = 2'-fluoro uridine
  modified_base 13: mod_base = OTHER; note = 2'O-methyl cytidine
  modified_base 14: mod_base = OTHER; note = 2'-fluoro cytidine
  modified_base 15: mod_base = OTHER; note = 2'O-methyl cytidine
  modified_base 16: mod_base = OTHER; note = 2'-fluoro adenosine
  modified_base 17: mod_base = OTHER; note = 2'O-methyl guanosine
  modified_base 18: mod_base = OTHER; note = 2'-fluoro cytidine
  modified_base 19: mod_base = OTHER; note = 2'O-methyl adenosine
  modified_base 20: mod_base = OTHER; note = 2'-fluoro cytidine
  modified_base 21: mod_base = OTHER; note = 2'O-methyl cytidine phosphorothioate
  modified_base 22: mod_base = OTHER; note = 2'O-methyl uridine phosphorothioate
  modified_base 23: mod_base = OTHER; note = 2'O-methyl uridine
aggcatatctctcccagcacctt

SEQ ID NO: 1912 - RNA, 23 nt, synthetic construct
  source 1..23: mol_type = other RNA
  modified_base 1: mod_base = OTHER; note = 5' vinyl phosphonate 2'O-methyl adenosine phosphorothioate
  modified_base 2: mod_base = OTHER; note = 2'-fluoro adenosine phosphorothioate
  modified_base 3: mod_base = OTHER; note = 2'O-methyl guanosine
  modified_base 4: mod_base = OTHER; note = 2'-fluoro guanosine
  modified_base 5: mod_base = OTHER; note = 2'O-methyl cytidine
  modified_base 6: mod_base = OTHER; note = 2'-fluoro adenosine
  modified_base 7: mod_base = OTHER; note = 2'O-methyl uridine
  modified_base 8: mod_base = OTHER; note = 2'-fluoro adenosine
  modified_base 9: mod_base = OTHER; note = 2'O-methyl uridine
  modified_base 10: mod_base = OTHER; note = 2'-fluoro cytidine
  modified_base 11: mod_base = OTHER; note = 2'O-methyl uridine
  modified_base 12: mod_base = OTHER; note = 2'-fluoro cytidine
  modified_base 13: mod_base = OTHER; note = 2'O-methyl uridine
  modified_base 14: mod_base = OTHER; note = 2'-fluoro cytidine
  modified_base 15: mod_base = OTHER; note = 2'O-methyl cytidine
  modified_base 16: mod_base = OTHER; note = 2'-fluoro cytidine
  modified_base 17: mod_base = OTHER; note = 2'O-methyl adenosine
  modified_base 18: mod_base = OTHER; note = 2'-fluoro guanosine
  modified_base 19: mod_base = OTHER; note = 2'O-methyl cytidine
  modified_base 20: mod_base = OTHER; note = 2'-fluoro adenosine
  modified_base 21: mod_base = OTHER; note = 2'O-methyl cytidine phosphorothioate
  modified_base 22: mod_base = OTHER; note = 2'O-methyl uridine phosphorothioate
  modified_base 23: mod_base = OTHER; note = 2'O-methyl uridine
aaggcatatctctcccagcactt

SEQ ID NO: 1913 - RNA, 23 nt, synthetic construct
  source 1..23: mol_type = other RNA
  modified_base 1: mod_base = OTHER; note = 5' vinyl phosphonate 2'O-methyl uridine phosphorothioate
  modified_base 2: mod_base = OTHER; note = 2'-fluoro uridine phosphorothioate
  modified_base 3: mod_base = OTHER; note = 2'O-methyl cytidine
  modified_base 4: mod_base = OTHER; note = 2'-fluoro uridine
  modified_base 5: mod_base = OTHER; note = 2'O-methyl cytidine
  modified_base 6: mod_base = OTHER; note = 2'-fluoro uridine
  modified_base 7: mod_base = OTHER; note = 2'O-methyl uridine
  modified_base 8: mod_base = OTHER; note = 2'-fluoro cytidine
  modified_base 9: mod_base = OTHER; note = 2'O-methyl cytidine
  modified_base 10: mod_base = OTHER; note = 2'-fluoro adenosine
  modified_base 11: mod_base = OTHER; note = 2'O-methyl adenosine
  modified_base 12: mod_base = OTHER; note = 2'-fluoro guanosine
  modified_base 13: mod_base = OTHER; note = 2'O-methyl adenosine
  modified_base 14: mod_base = OTHER; note = 2'-fluoro adenosine
  modified_base 15: mod_base = OTHER; note = 2'O-methyl cytidine
  modified_base 16: mod_base = OTHER; note = 2'-fluoro cytidine
  modified_base 17: mod_base = OTHER; note = 2'O-methyl uridine
  modified_base 18: mod_base = OTHER; note = 2'-fluoro guanosine
  modified_base 19: mod_base = OTHER; note = 2'O-methyl adenosine
  modified_base 20: mod_base = OTHER; note = 2'-fluoro adenosine
  modified_base 21: mod_base = OTHER; note = 2'O-methyl uridine phosphorothioate
  modified_base 22: mod_base = OTHER; note = 2'O-methyl uridine phosphorothioate
  modified_base 23: mod_base = OTHER; note = 2'O-methyl uridine
ttctcttccaagaacctgaattt

SEQ ID NO: 1914 - RNA, 23 nt, synthetic construct
  source 1..23: mol_type = other RNA
  modified_base 1: mod_base = OTHER; note = 5' vinyl phosphonate 2'O-methyl adenosine phosphorothioate
  modified_base 2: mod_base = OTHER; note = 2'-fluoro uridine phosphorothioate
  modified_base 3: mod_base = OTHER; note = 2'O-methyl guanosine
  modified_base 4: mod_base = OTHER; note = 2'-fluoro cytidine
  modified_base 5: mod_base = OTHER; note = 2'O-methyl cytidine
  modified_base 6: mod_base = OTHER; note = 2'-fluoro cytidine
  modified_base 7: mod_base = OTHER; note = 2'O-methyl uridine
  modified_base 8: mod_base = OTHER; note = 2'-fluoro uridine
  modified_base 9: mod_base = OTHER; note = 2'O-methyl cytidine
  modified_base 10: mod_base = OTHER; note = 2'-fluoro uridine
  modified_base 11: mod_base = OTHER; note = 2'O-methyl cytidine
  modified_base 12: mod_base = OTHER; note = 2'-fluoro uridine
  modified_base 13: mod_base = OTHER; note = 2'O-methyl uridine
  modified_base 14: mod_base = OTHER; note = 2'-fluoro cytidine
  modified_base 15: mod_base = OTHER; note = 2'O-methyl cytidine
  modified_base 16: mod_base = OTHER; note = 2'-fluoro adenosine
  modified_base 17: mod_base = OTHER; note = 2'O-methyl adenosine
  modified_base 18: mod_base = OTHER; note = 2'-fluoro guanosine
  modified_base 19: mod_base = OTHER; note = 2'O-methyl adenosine
  modified_base 20: mod_base = OTHER; note = 2'-fluoro adenosine
  modified_base 21: mod_base = OTHER; note = 2'O-methyl cytidine phosphorothioate
  modified_base 22: mod_base = OTHER; note = 2'O-methyl uridine phosphorothioate
  modified_base 23: mod_base = OTHER; note = 2'O-methyl uridine
atgcccttctcttccaagaactt

SEQ ID NO: 1915 - RNA, 23 nt, synthetic construct
  source 1..23: mol_type = other RNA
  modified_base 1: mod_base = OTHER; note = 5' vinyl phosphonate 2'O-methyl guanosine phosphorothioate
  modified_base 2: mod_base = OTHER; note = 2'-fluoro adenosine phosphorothioate
  modified_base 3: mod_base = OTHER; note = 2'O-methyl uridine
  modified_base 4: mod_base = OTHER; note = 2'-fluoro guanosine
  modified_base 5: mod_base = OTHER; note = 2'O-methyl cytidine
  modified_base 6: mod_base = OTHER; note = 2'-fluoro cytidine
  modified_base 7: mod_base = OTHER; note = 2'O-methyl cytidine
  modified_base 8: mod_base = OTHER; note = 2'-fluoro uridine
  modified_base 9: mod_base = OTHER; note = 2'O-methyl uridine
  modified_base 10: mod_base = OTHER; note = 2'-fluoro cytidine
  modified_base 11: mod_base = OTHER; note = 2'O-methyl uridine
  modified_base 12: mod_base = OTHER; note = 2'-fluoro cytidine
  modified_base 13: mod_base = OTHER; note = 2'O-methyl uridine
  modified_base 14: mod_base = OTHER; note = 2'-fluoro uridine
  modified_base 15: mod_base = OTHER; note = 2'O-methyl cytidine
  modified_base 16: mod_base = OTHER; note = 2'-fluoro cytidine
  modified_base 17: mod_base = OTHER; note = 2'O-methyl adenosine
  modified_base 18: mod_base = OTHER; note = 2'-fluoro adenosine
  modified_base 19: mod_base = OTHER; note = 2'O-methyl guanosine
  modified_base 20: mod_base = OTHER; note = 2'-fluoro adenosine
  modified_base 21: mod_base = OTHER; note = 2'O-methyl adenosine phosphorothioate
  modified_base 22: mod_base = OTHER; note = 2'O-methyl uridine phosphorothioate
  modified_base 23: mod_base = OTHER; note = 2'O-methyl uridine
gatgcccttctcttccaagaatt

SEQ ID NO: 1916 - RNA, 23 nt, synthetic construct
  source 1..23: mol_type = other RNA
  modified_base 1: mod_base = OTHER; note = 5' vinyl phosphonate 2'O-methyl adenosine phosphorothioate
  modified_base 2: mod_base = OTHER; note = 2'-fluoro guanosine phosphorothioate
  modified_base 3: mod_base = OTHER; note = 2'O-methyl adenosine
  modified_base 4: mod_base = OTHER; note = 2'-fluoro uridine
  modified_base 5: mod_base = OTHER; note = 2'O-methyl guanosine
  modified_base 6: mod_base = OTHER; note = 2'-fluoro cytidine
  modified_base 7: mod_base = OTHER; note = 2'O-methyl cytidine
  modified_base 8: mod_base = OTHER; note = 2'-fluoro cytidine
  modified_base 9: mod_base = OTHER; note = 2'O-methyl uridine
  modified_base 10: mod_base = OTHER; note = 2'-fluoro uridine
  modified_base 11: mod_base = OTHER; note = 2'O-methyl cytidine
  modified_base 12: mod_base = OTHER; note = 2'-fluoro uridine
  modified_base 13: mod_base = OTHER; note = 2'O-methyl cytidine
  modified_base 14: mod_base = OTHER; note = 2'-fluoro uridine
  modified_base 15: mod_base = OTHER; note = 2'O-methyl uridine
  modified_base 16: mod_base = OTHER; note = 2'-fluoro cytidine
  modified_base 17: mod_base = OTHER; note = 2'O-methyl cytidine
  modified_base 18: mod_base = OTHER; note = 2'-fluoro adenosine
  modified_base 19: mod_base = OTHER; note = 2'O-methyl adenosine
  modified_base 20: mod_base = OTHER; note = 2'-fluoro guanosine
  modified_base 21: mod_base = OTHER; note = 2'O-methyl adenosine phosphorothioate
  modified_base 22: mod_base = OTHER; note = 2'O-methyl uridine phosphorothioate
  modified_base 23: mod_base = OTHER; note = 2'O-methyl uridine
agatgcccttctcttccaagatt

SEQ ID NO: 1917 - RNA, 23 nt, synthetic construct
  source 1..23: mol_type = other RNA
  modified_base 1: mod_base = OTHER; note = 5' vinyl phosphonate 2'O-methyl cytidine phosphorothioate
  modified_base 2: mod_base = OTHER; note = 2'-fluoro adenosine phosphorothioate
  modified_base 3: mod_base = OTHER; note = 2'O-methyl guanosine
  modified_base 4: mod_base = OTHER; note = 2'-fluoro adenosine
  modified_base 5: mod_base = OTHER; note = 2'O-methyl uridine
  modified_base 6: mod_base = OTHER; note = 2'-fluoro guanosine
  modified_base 7: mod_base = OTHER; note = 2'O-methyl cytidine
  modified_base 8: mod_base = OTHER; note = 2'-fluoro cytidine
  modified_base 9: mod_base = OTHER; note = 2'O-methyl cytidine
  modified_base 10: mod_base = OTHER; note = 2'-fluoro uridine
  modified_base 11: mod_base = OTHER; note = 2'O-methyl uridine
  modified_base 12: mod_base = OTHER; note = 2'-fluoro cytidine
  modified_base 13: mod_base = OTHER; note = 2'O-methyl uridine
  modified_base 14: mod_base = OTHER; note = 2'-fluoro cytidine
  modified_base 15: mod_base = OTHER; note = 2'O-methyl uridine
  modified_base 16: mod_base = OTHER; note = 2'-fluoro uridine
  modified_base 17: mod_base = OTHER; note = 2'O-methyl cytidine
  modified_base 18: mod_base = OTHER; note = 2'-fluoro cytidine
  modified_base 19: mod_base = OTHER; note = 2'O-methyl adenosine
  modified_base 20: mod_base = OTHER; note = 2'-fluoro adenosine
  modified_base 21: mod_base = OTHER; note = 2'O-methyl guanosine phosphorothioate
  modified_base 22: mod_base = OTHER; note = 2'O-methyl uridine phosphorothioate
  modified_base 23: mod_base = OTHER; note = 2'O-methyl uridine
cagatgcccttctcttccaagtt

SEQ ID NO: 1918 - RNA, 23 nt, synthetic construct
  source 1..23: mol_type = other RNA
  modified_base 1: mod_base = OTHER; note = 5' vinyl phosphonate 2'O-methyl guanosine phosphorothioate
  modified_base 2: mod_base = OTHER; note = 2'-fluoro cytidine phosphorothioate
  modified_base 3: mod_base = OTHER; note = 2'O-methyl adenosine
  modified_base 4: mod_base = OTHER; note = 2'-fluoro guanosine
  modified_base 5: mod_base = OTHER; note = 2'O-methyl adenosine
  modified_base 6: mod_base = OTHER; note = 2'-fluoro uridine
  modified_base 7: mod_base = OTHER; note = 2'O-methyl guanosine
  modified_base 8: mod_base = OTHER; note = 2'-fluoro cytidine
  modified_base 9: mod_base = OTHER; note = 2'O-methyl cytidine
  modified_base 10: mod_base = OTHER; note = 2'-fluoro cytidine
  modified_base 11: mod_base = OTHER; note = 2'O-methyl uridine
  modified_base 12: mod_base = OTHER; note = 2'-fluoro uridine
  modified_base 13: mod_base = OTHER; note = 2'O-methyl cytidine
  modified_base 14: mod_base = OTHER; note = 2'-fluoro uridine
  modified_base 15: mod_base = OTHER; note = 2'O-methyl cytidine
  modified_base 16: mod_base = OTHER; note = 2'-fluoro uridine
  modified_base 17: mod_base = OTHER; note = 2'O-methyl uridine
  modified_base 18: mod_base = OTHER; note = 2'-fluoro cytidine
  modified_base 19: mod_base = OTHER; note = 2'O-methyl cytidine
  modified_base 20: mod_base = OTHER; note = 2'-fluoro adenosine
  modified_base 21: mod_base = OTHER; note = 2'O-methyl adenosine phosphorothioate
  modified_base 22: mod_base = OTHER; note = 2'O-methyl uridine phosphorothioate
  modified_base 23: mod_base = OTHER; note = 2'O-methyl uridine
gcagatgcccttctcttccaatt

SEQ ID NO: 1919 - RNA, 23 nt, synthetic construct
  source 1..23: mol_type = other RNA
  modified_base 1: mod_base = OTHER; note = 5' vinyl phosphonate 2'O-methyl uridine phosphorothioate
  modified_base 2: mod_base = OTHER; note = 2'-fluoro uridine phosphorothioate
  modified_base 3: mod_base = OTHER; note = 2'O-methyl guanosine
  modified_base 4: mod_base = OTHER; note = 2'-fluoro cytidine
  modified_base 5: mod_base = OTHER; note = 2'O-methyl adenosine
  modified_base 6: mod_base = OTHER; note = 2'-fluoro guanosine
  modified_base 7: mod_base = OTHER; note = 2'O-methyl adenosine
  modified_base 8: mod_base = OTHER; note = 2'-fluoro uridine
  modified_base 9: mod_base = OTHER; note = 2'O-methyl guanosine
  modified_base 10: mod_base = OTHER; note = 2'-fluoro cytidine
  modified_base 11: mod_base = OTHER; note = 2'O-methyl cytidine
  modified_base 12: mod_base = OTHER; note = 2'-fluoro cytidine
  modified_base 13: mod_base = OTHER; note = 2'O-methyl uridine
  modified_base 14: mod_base = OTHER; note = 2'-fluoro uridine
  modified_base 15: mod_base = OTHER; note = 2'O-methyl cytidine
  modified_base 16: mod_base = OTHER; note = 2'-fluoro uridine
  modified_base 17: mod_base = OTHER; note = 2'O-methyl cytidine
  modified_base 18: mod_base = OTHER; note = 2'-fluoro uridine
  modified_base 19: mod_base = OTHER; note = 2'O-methyl uridine
  modified_base 20: mod_base = OTHER; note = 2'-fluoro cytidine
  modified_base 21: mod_base = OTHER; note = 2'O-methyl cytidine phosphorothioate
  modified_base 22: mod_base = OTHER; note = 2'O-methyl uridine phosphorothioate
  modified_base 23: mod_base = OTHER; note = 2'O-methyl uridine
ttgcagatgcccttctcttcctt

SEQ ID NO: 1920 - RNA, 23 nt, synthetic construct
  source 1..23: mol_type = other RNA
  modified_base 1: mod_base = OTHER; note = 5' vinyl phosphonate 2'O-methyl guanosine phosphorothioate
  modified_base 2: mod_base = OTHER; note = 2'-fluoro uridine phosphorothioate
  modified_base 3: mod_base = OTHER; note = 2'O-methyl uridine
  modified_base 4: mod_base = OTHER; note = 2'-fluoro guanosine
  modified_base 5: mod_base = OTHER; note = 2'O-methyl cytidine
  modified_base 6: mod_base = OTHER; note = 2'-fluoro adenosine
  modified_base 7: mod_base = OTHER; note = 2'O-methyl guanosine
  modified_base 8: mod_base = OTHER; note = 2'-fluoro adenosine
  modified_base 9: mod_base = OTHER; note = 2'O-methyl uridine
  modified_base 10: mod_base = OTHER; note = 2'-fluoro guanosine
  modified_base 11: mod_base = OTHER; note = 2'O-methyl cytidine
  modified_base 12: mod_base = OTHER; note = 2'-fluoro cytidine
  modified_base 13: mod_base = OTHER; note = 2'O-methyl cytidine
  modified_base 14: mod_base = OTHER; note = 2'-fluoro uridine
  modified_base 15: mod_base = OTHER; note = 2'O-methyl uridine
  modified_base 16: mod_base = OTHER; note = 2'-fluoro cytidine
  modified_base 17: mod_base = OTHER; note = 2'O-methyl uridine
  modified_base 18: mod_base = OTHER; note = 2'-fluoro cytidine
  modified_base 19: mod_base = OTHER; note = 2'O-methyl uridine
  modified_base 20: mod_base = OTHER; note = 2'-fluoro uridine
  modified_base 21: mod_base = OTHER; note = 2'O-methyl cytidine phosphorothioate
  modified_base 22: mod_base = OTHER; note = 2'O-methyl uridine phosphorothioate
  modified_base 23: mod_base = OTHER; note = 2'O-methyl uridine
gttgcagatgcccttctcttctt

SEQ ID NO: 1921 - RNA, 23 nt, synthetic construct
  source 1..23: mol_type = other RNA
  modified_base 1: mod_base = OTHER; note = 5' vinyl phosphonate 2'O-methyl uridine phosphorothioate
  modified_base 2: mod_base = OTHER; note = 2'-fluoro guanosine phosphorothioate
  modified_base 3: mod_base = OTHER; note = 2'O-methyl uridine
  modified_base 4: mod_base = OTHER; note = 2'-fluoro uridine
  modified_base 5: mod_base = OTHER; note = 2'O-methyl guanosine
  modified_base 6: mod_base = OTHER; note = 2'-fluoro cytidine
  modified_base 7: mod_base = OTHER; note = 2'O-methyl adenosine
  modified_base 8: mod_base = OTHER; note = 2'-fluoro guanosine
  modified_base 9: mod_base = OTHER; note = 2'O-methyl adenosine
  modified_base 10: mod_base = OTHER; note = 2'-fluoro uridine
  modified_base 11: mod_base = OTHER; note = 2'O-methyl guanosine
  modified_base 12: mod_base = OTHER; note = 2'-fluoro cytidine
  modified_base 13: mod_base = OTHER; note = 2'O-methyl cytidine
  modified_base 14: mod_base = OTHER; note = 2'-fluoro cytidine
  modified_base 15: mod_base = OTHER; note = 2'O-methyl uridine
  modified_base 16: mod_base = OTHER; note = 2'-fluoro uridine
  modified_base 17: mod_base = OTHER; note = 2'O-methyl cytidine
  modified_base 18: mod_base = OTHER; note = 2'-fluoro uridine
  modified_base 19: mod_base = OTHER; note = 2'O-methyl cytidine
  modified_base 20: mod_base = OTHER; note = 2'-fluoro uridine
  modified_base 21: mod_base = OTHER; note = 2'O-methyl uridine phosphorothioate
  modified_base 22: mod_base = OTHER; note = 2'O-methyl uridine phosphorothioate
  modified_base 23: mod_base = OTHER; note = 2'O-methyl uridine
tgttgcagatgcccttctctttt

SEQ ID NO: 1922 - RNA, 23 nt, synthetic construct
  source 1..23: mol_type = other RNA
  modified_base 1: mod_base = OTHER; note = 5' vinyl phosphonate 2'O-methyl guanosine phosphorothioate
  modified_base 2: mod_base = OTHER; note = 2'-fluoro cytidine phosphorothioate
  modified_base 3: mod_base = OTHER; note = 2'O-methyl cytidine
  modified_base 4: mod_base = OTHER; note = 2'-fluoro uridine
  modified_base 5: mod_base = OTHER; note = 2'O-methyl guanosine
  modified_base 6: mod_base = OTHER; note = 2'-fluoro uridine
  modified_base 7: mod_base = OTHER; note = 2'O-methyl uridine
  modified_base 8: mod_base = OTHER; note = 2'-fluoro guanosine
  modified_base 9: mod_base = OTHER; note = 2'O-methyl cytidine
  modified_base 10: mod_base = OTHER; note = 2'-fluoro adenosine
  modified_base 11: mod_base = OTHER; note = 2'O-methyl guanosine
  modified_base 12: mod_base = OTHER; note = 2'-fluoro adenosine
  modified_base 13: mod_base = OTHER; note = 2'O-methyl uridine
  modified_base 14: mod_base = OTHER; note = 2'-fluoro guanosine
  modified_base 15: mod_base = OTHER; note = 2'O-methyl cytidine
  modified_base 16: mod_base = OTHER; note = 2'-fluoro cytidine
  modified_base 17: mod_base = OTHER; note = 2'O-methyl cytidine
  modified_base 18: mod_base = OTHER; note = 2'-fluoro uridine
  modified_base 19: mod_base = OTHER; note = 2'O-methyl uridine
  modified_base 20: mod_base = OTHER; note = 2'-fluoro cytidine
  modified_base 21: mod_base = OTHER; note = 2'O-methyl uridine phosphorothioate
  modified_base 22: mod_base = OTHER; note = 2'O-methyl uridine phosphorothioate
  modified_base 23: mod_base = OTHER; note = 2'O-methyl uridine
gcctgttgcagatgcccttcttt

SEQ ID NO: 1923 - RNA, 23 nt, synthetic construct
  source 1..23: mol_type = other RNA
  modified_base 1: mod_base = OTHER; note = 5' vinyl phosphonate 2'O-methyl guanosine phosphorothioate
  modified_base 2: mod_base = OTHER; note = 2'-fluoro guanosine phosphorothioate
  modified_base 3: mod_base = OTHER; note = 2'O-methyl cytidine
  modified_base 4: mod_base = OTHER; note = 2'-fluoro cytidine
  modified_base 5: mod_base = OTHER; note = 2'O-methyl uridine
  modified_base 6: mod_base = OTHER; note = 2'-fluoro guanosine
  modified_base 7: mod_base = OTHER; note = 2'O-methyl uridine
  modified_base 8: mod_base = OTHER; note = 2'-fluoro uridine
  modified_base 9: mod_base = OTHER; note = 2'O-methyl guanosine
  modified_base 10: mod_base = OTHER; note = 2'-fluoro cytidine
  modified_base 11: mod_base = OTHER; note = 2'O-methyl adenosine
  modified_base 12: mod_base = OTHER; note = 2'-fluoro guanosine
  modified_base 13: mod_base = OTHER; note = 2'O-methyl adenosine
  modified_base 14: mod_base = OTHER; note = 2'-fluoro uridine
  modified_base 15: mod_base = OTHER; note = 2'O-methyl guanosine
  modified_base 16: mod_base = OTHER; note = 2'-fluoro cytidine
  modified_base 17: mod_base = OTHER; note = 2'O-methyl cytidine
  modified_base 18: mod_base = OTHER; note = 2'-fluoro cytidine
  modified_base 19: mod_base = OTHER; note = 2'O-methyl uridine
  modified_base 20: mod_base = OTHER; note = 2'-fluoro uridine
  modified_base 21: mod_base = OTHER; note = 2'O-methyl cytidine phosphorothioate
  modified_base 22: mod_base = OTHER; note = 2'O-methyl uridine phosphorothioate
  modified_base 23: mod_base = OTHER; note = 2'O-methyl uridine
ggcctgttgcagatgcccttctt

SEQ ID NO: 1924 - RNA, 23 nt, synthetic construct
  source 1..23: mol_type = other RNA
  modified_base 1: mod_base = OTHER; note = 5' vinyl phosphonate 2'O-methyl guanosine phosphorothioate
  modified_base 2: mod_base = OTHER; note = 2'-fluoro cytidine phosphorothioate
  modified_base 3: mod_base = OTHER; note = 2'O-methyl uridine
  modified_base 4: mod_base = OTHER; note = 2'-fluoro guanosine
  modified_base 5: mod_base = OTHER; note = 2'O-methyl guanosine
  modified_base 6: mod_base = OTHER; note = 2'-fluoro guanosine
  modified_base 7: mod_base = OTHER; note = 2'O-methyl guanosine
  modified_base 8: mod_base = OTHER; note = 2'-fluoro cytidine
  modified_base 9: mod_base = OTHER; note = 2'O-methyl cytidine
  modified_base 10: mod_base = OTHER; note = 2'-fluoro uridine
  modified_base 11: mod_base = OTHER; note = 2'O-methyl guanosine
  modified_base 12: mod_base = OTHER; note = 2'-fluoro uridine
  modified_base 13: mod_base = OTHER; note = 2'O-methyl uridine
  modified_base 14: mod_base = OTHER; note = 2'-fluoro guanosine
  modified_base 15: mod_base = OTHER; note = 2'O-methyl cytidine
  modified_base 16: mod_base = OTHER; note = 2'-fluoro adenosine
  modified_base 17: mod_base = OTHER; note = 2'O-methyl guanosine
  modified_base 18: mod_base = OTHER; note = 2'-fluoro adenosine
  modified_base 19: mod_base = OTHER; note = 2'O-methyl uridine
  modified_base 20: mod_base = OTHER; note = 2'-fluoro guanosine
  modified_base 21: mod_base = OTHER; note = 2'O-methyl cytidine phosphorothioate
  modified_base 22: mod_base = OTHER; note = 2'O-methyl uridine phosphorothioate
  modified_base 23: mod_base = OTHER; note = 2'O-methyl uridine
gctggggcctgttgcagatgctt

SEQ ID NO: 1925 - RNA, 23 nt, synthetic construct
  source 1..23: mol_type = other RNA
  modified_base 1: mod_base = OTHER; note = 5' vinyl phosphonate 2'O-methyl cytidine phosphorothioate
  modified_base 2: mod_base = OTHER; note = 2'-fluoro uridine phosphorothioate
  modified_base 3: mod_base = OTHER; note = 2'O-methyl adenosine
  modified_base 4: mod_base = OTHER; note = 2'-fluoro adenosine
  modified_base 5: mod_base = OTHER; note = 2'O-methyl uridine
  modified_base 6: mod_base = OTHER; note = 2'-fluoro guanosine
  modified_base 7: mod_base = OTHER; note = 2'O-methyl guanosine
  modified_base 8: mod_base = OTHER; note = 2'-fluoro guanosine
  modified_base 9: mod_base = OTHER; note = 2'O-methyl uridine
  modified_base 10: mod_base = OTHER; note = 2'-fluoro adenosine
  modified_base 11: mod_base = OTHER; note = 2'O-methyl guanosine
  modified_base 12: mod_base = OTHER; note = 2'-fluoro cytidine
  modified_base 13: mod_base = OTHER; note = 2'O-methyl adenosine
  modified_base 14: mod_base = OTHER; note = 2'-fluoro adenosine
  modified_base 15: mod_base = OTHER; note = 2'O-methyl guanosine
  modified_base 16: mod_base = OTHER; note = 2'-fluoro uridine
  modified_base 17: mod_base = OTHER; note = 2'O-methyl uridine
  modified_base 18: mod_base = OTHER; note = 2'-fluoro guanosine
  modified_base 19: mod_base = OTHER; note = 2'O-methyl cytidine
  modified_base 20: mod_base = OTHER; note = 2'-fluoro adenosine
  modified_base 21: mod_base = OTHER; note = 2'O-methyl adenosine phosphorothioate
  modified_base 22: mod_base = OTHER; note = 2'O-methyl uridine phosphorothioate
  modified_base 23: mod_base = OTHER; note = 2'O-methyl uridine
ctaatgggtagcaagttgcaatt

SEQ ID NO: 1926 - RNA, 23 nt, synthetic construct
  source 1..23: mol_type = other RNA
  modified_base 1: mod_base = OTHER; note = 5' vinyl phosphonate 2'O-methyl adenosine phosphorothioate
  modified_base 2: mod_base = OTHER; note = 2'-fluoro uridine phosphorothioate
  modified_base 3: mod_base = OTHER; note = 2'O-methyl adenosine
  modified_base 4: mod_base = OTHER; note = 2'-fluoro adenosine
  modified_base 5: mod_base = OTHER; note = 2'O-methyl guanosine
  modified_base 6: mod_base = OTHER; note = 2'-fluoro adenosine
  modified_base 7: mod_base = OTHER; note = 2'O-methyl cytidine
  modified_base 8: mod_base = OTHER; note = 2'-fluoro adenosine
  modified_base 9: mod_base = OTHER; note = 2'O-methyl uridine
  modified_base 10: mod_base = OTHER; note = 2'-fluoro uridine
  modified_base 11: mod_base = OTHER; note = 2'O-methyl adenosine
  modified_base 12: mod_base = OTHER; note = 2'-fluoro uridine
  modified_base 13: mod_base = OTHER; note = 2'O-methyl cytidine
  modified_base 14: mod_base = OTHER; note = 2'-fluoro cytidine
  modified_base 15: mod_base = OTHER; note = 2'O-methyl uridine
  modified_base 16: mod_base = OTHER; note = 2'-fluoro adenosine
  modified_base 17: mod_base = OTHER; note = 2'O-methyl adenosine
  modified_base 18: mod_base = OTHER; note = 2'-fluoro uridine
  modified_base 19: mod_base = OTHER; note = 2'O-methyl guanosine
  modified_base 20: mod_base = OTHER; note = 2'-fluoro guanosine
  modified_base 21: mod_base = OTHER; note = 2'O-methyl guanosine phosphorothioate
  modified_base 22: mod_base = OTHER; note = 2'O-methyl uridine phosphorothioate
  modified_base 23: mod_base = OTHER; note = 2'O-methyl uridine
ataagacattatcctaatgggtt

SEQ ID NO: 1927 - RNA, 23 nt, synthetic construct
  source 1..23: mol_type = other RNA
  modified_base 1: mod_base = OTHER; note = 5' vinyl phosphonate 2'O-methyl guanosine phosphorothioate
  modified_base 2: mod_base = OTHER; note = 2'-fluoro guanosine phosphorothioate
  modified_base 3: mod_base = OTHER; note = 2'O-methyl cytidine
  modified_base 4: mod_base = OTHER; note = 2'-fluoro adenosine
  modified_base 5: mod_base = OTHER; note = 2'O-methyl guanosine
  modified_base 6: mod_base = OTHER; note = 2'-fluoro guanosine
  modified_base 7: mod_base = OTHER; note = 2'O-methyl guanosine
  modified_base 8: mod_base = OTHER; note = 2'-fluoro uridine
  modified_base 9: mod_base = OTHER; note = 2'O-methyl adenosine
  modified_base 10: mod_base = OTHER; note = 2'-fluoro cytidine
  modified_base 11: mod_base = OTHER; note = 2'O-methyl adenosine
  modified_base 12: mod_base = OTHER; note = 2'-fluoro guanosine
  modified_base 13: mod_base = OTHER; note = 2'O-methyl guanosine
  modified_base 14: mod_base = OTHER; note = 2'-fluoro guanosine
  modified_base 15: mod_base = OTHER; note = 2'O-methyl cytidine
  modified_base 16: mod_base = OTHER; note = 2'-fluoro adenosine
  modified_base 17: mod_base = OTHER; note = 2'O-methyl guanosine
  modified_base 18: mod_base = OTHER; note = 2'-fluoro cytidine
  modified_base 19: mod_base = OTHER; note = 2'O-methyl adenosine
  modified_base 20: mod_base = OTHER; note = 2'-fluoro uridine
  modified_base 21: mod_base = OTHER; note = 2'O-methyl uridine phosphorothioate
  modified_base 22: mod_base = OTHER; note = 2'O-methyl uridine phosphorothioate
  modified_base 23: mod_base = OTHER; note = 2'O-methyl uridine
ggcagggtacagggcagcatttt

SEQ ID NO: 1928 - RNA, 23 nt, synthetic construct
  source 1..23: mol_type = other RNA
  modified_base 1: mod_base = OTHER; note = 5' vinyl phosphonate 2'O-methyl cytidine phosphorothioate
  modified_base 2: mod_base = OTHER; note = 2'-fluoro cytidine phosphorothioate
  modified_base 3: mod_base = OTHER; note = 2'O-methyl adenosine
  modified_base 4: mod_base = OTHER; note = 2'-fluoro cytidine
  modified_base 5: mod_base = OTHER; note = 2'O-methyl adenosine
  modified_base 6: mod_base = OTHER; note = 2'-fluoro guanosine
  modified_base 7: mod_base = OTHER; note = 2'O-methyl guanosine
  modified_base 8: mod_base = OTHER; note = 2'-fluoro cytidine
  modified_base 9: mod_base = OTHER; note = 2'O-methyl adenosine
  modified_base 10: mod_base = OTHER; note = 2'-fluoro guanosine
  modified_base 11: mod_base = OTHER; note = 2'O-methyl guanosine
  modified_base 12: mod_base = OTHER; note = 2'-fluoro guanosine
  modified_base 13: mod_base = OTHER; note = 2'O-methyl uridine
  modified_base 14: mod_base = OTHER; note = 2'-fluoro adenosine
  modified_base 15: mod_base = OTHER; note = 2'O-methyl cytidine
  modified_base 16: mod_base = OTHER; note = 2'-fluoro adenosine
  modified_base 17: mod_base = OTHER; note = 2'O-methyl guanosine
  modified_base 18: mod_base = OTHER; note = 2'-fluoro guanosine
  modified_base 19: mod_base = OTHER; note = 2'O-methyl guanosine
  modified_base 20: mod_base = OTHER; note = 2'-fluoro cytidine
  modified_base 21: mod_base = OTHER; note = 2'O-methyl adenosine phosphorothioate
  modified_base 22: mod_base = OTHER; note = 2'O-methyl uridine phosphorothioate
  modified_base 23: mod_base = OTHER; note = 2'O-methyl uridine
ccacaggcagggtacagggcatt

SEQ ID NO: 1929 - RNA, 23 nt, synthetic construct
  source 1..23: mol_type = other RNA
  modified_base 1: mod_base = OTHER; note = 5' vinyl phosphonate 2'O-methyl uridine phosphorothioate
  modified_base 2: mod_base = OTHER; note = 2'-fluoro cytidine phosphorothioate
  modified_base 3: mod_base = OTHER; note = 2'O-methyl cytidine
  modified_base 4: mod_base = OTHER; note = 2'-fluoro adenosine
  modified_base 5: mod_base = OTHER; note = 2'O-methyl cytidine
  modified_base 6: mod_base = OTHER; note = 2'-fluoro adenosine
  modified_base 7: mod_base = OTHER; note = 2'O-methyl guanosine
  modified_base 8: mod_base = OTHER; note = 2'-fluoro guanosine
  modified_base 9: mod_base = OTHER; note = 2'O-methyl cytidine
  modified_base 10: mod_base = OTHER; note = 2'-fluoro adenosine
  modified_base 11: mod_base = OTHER; note = 2'O-methyl guanosine
  modified_base 12: mod_base = OTHER; note = 2'-fluoro guanosine
  modified_base 13: mod_base = OTHER; note = 2'O-methyl guanosine
  modified_base 14: mod_base = OTHER; note = 2'-fluoro uridine
  modified_base 15: mod_base = OTHER; note = 2'O-methyl adenosine
  modified_base 16: mod_base = OTHER; note = 2'-fluoro cytidine
  modified_base 17: mod_base = OTHER; note = 2'O-methyl adenosine
  modified_base 18: mod_base = OTHER; note = 2'-fluoro guanosine
  modified_base 19: mod_base = OTHER; note = 2'O-methyl guanosine
  modified_base 20: mod_base = OTHER; note = 2'-fluoro guanosine
  modified_base 21: mod_base = OTHER; note = 2'O-methyl cytidine phosphorothioate
  modified_base 22: mod_base = OTHER; note = 2'O-methyl uridine phosphorothioate
  modified_base 23: mod_base = OTHER; note = 2'O-methyl uridine
tccacaggcagggtacagggctt

SEQ ID NO: 1930 - RNA, 23 nt, synthetic construct
  source 1..23: mol_type = other RNA
  modified_base 1: mod_base = OTHER; note = 5' vinyl phosphonate 2'O-methyl adenosine phosphorothioate
  modified_base 2: mod_base = OTHER; note = 2'-fluoro uridine phosphorothioate
  modified_base 3: mod_base = OTHER; note = 2'O-methyl guanosine
  modified_base 4: mod_base = OTHER; note = 2'-fluoro guanosine
  modified_base 5: mod_base = OTHER; note = 2'O-methyl cytidine
  modified_base 6: mod_base = OTHER; note = 2'-fluoro adenosine
  modified_base 7: mod_base = OTHER; note = 2'O-methyl guanosine
  modified_base 8: mod_base = OTHER; note = 2'-fluoro adenosine
  modified_base 9: mod_base = OTHER; note = 2'O-methyl uridine
  modified_base 10: mod_base = OTHER; note = 2'-fluoro uridine
  modified_base 11: mod_base = OTHER; note = 2'O-methyl cytidine
  modified_base 12: mod_base = OTHER; note = 2'-fluoro cytidine
  modified_base 13: mod_base = OTHER; note = 2'O-methyl adenosine
  modified_base 14: mod_base = OTHER; note = 2'-fluoro cytidine
  modified_base 15: mod_base = OTHER; note = 2'O-methyl adenosine
  modified_base 16: mod_base = OTHER; note = 2'-fluoro guanosine
  modified_base 17: mod_base = OTHER; note = 2'O-methyl guanosine
  modified_base 18: mod_base = OTHER; note = 2'-fluoro cytidine
  modified_base 19: mod_base = OTHER; note = 2'O-methyl adenosine
  modified_base 20: mod_base = OTHER; note = 2'-fluoro guanosine
  modified_base 21: mod_base = OTHER; note = 2'O-methyl guanosine phosphorothioate
  modified_base 22: mod_base = OTHER; note = 2'O-methyl uridine phosphorothioate
  modified_base 23: mod_base = OTHER; note = 2'O-methyl uridine
atggcagattccacaggcaggtt

SEQ ID NO: 1931 - RNA, 23 nt, synthetic construct
  source 1..23: mol_type = other RNA
  modified_base 1: mod_base = OTHER; note = 5' vinyl phosphonate 2'O-methyl guanosine phosphorothioate
  modified_base 2: mod_base = OTHER; note = 2'-fluoro cytidine phosphorothioate
  modified_base 3: mod_base = OTHER; note = 2'O-methyl adenosine
  modified_base 4: mod_base = OTHER; note = 2'-fluoro adenosine
  modified_base 5: mod_base = OTHER; note = 2'O-methyl uridine
  modified_base 6: mod_base = OTHER; note = 2'-fluoro guanosine
  modified_base 7: mod_base = OTHER; note = 2'O-methyl guanosine
  modified_base 8: mod_base = OTHER; note = 2'-fluoro cytidine
  modified_base 9: mod_base = OTHER; note = 2'O-methyl adenosine
  modified_base 10: mod_base = OTHER; note = 2'-fluoro guanosine
  modified_base 11: mod_base = OTHER; note = 2'O-methyl adenosine
  modified_base 12: mod_base = OTHER; note = 2'-fluoro uridine
  modified_base 13: mod_base = OTHER; note = 2'O-methyl uridine
  modified_base 14: mod_base = OTHER; note = 2'-fluoro cytidine
  modified_base 15: mod_base = OTHER; note = 2'O-methyl cytidine
  modified_base 16: mod_base = OTHER; note = 2'-fluoro adenosine
  modified_base 17: mod_base = OTHER; note = 2'O-methyl cytidine
  modified_base 18: mod_base = OTHER; note = 2'-fluoro adenosine
  modified_base 19: mod_base = OTHER; note = 2'O-methyl guanosine
  modified_base 20: mod_base = OTHER; note = 2'-fluoro guanosine
  modified_base 21: mod_base = OTHER; note = 2'O-methyl cytidine phosphorothioate
  modified_base 22: mod_base = OTHER; note = 2'O-methyl uridine phosphorothioate
  modified_base 23: mod_base = OTHER; note = 2'O-methyl uridine
gcaatggcagattccacaggctt

SEQ ID NO: 1932 - RNA, 23 nt, synthetic construct
  source 1..23: mol_type = other RNA
  modified_base 1: mod_base = OTHER; note = 5' vinyl phosphonate 2'O-methyl cytidine phosphorothioate
  modified_base 2: mod_base = OTHER; note = 2'-fluoro adenosine phosphorothioate
  modified_base 3: mod_base = OTHER; note = 2'O-methyl cytidine
  modified_base 4: mod_base = OTHER; note = 2'-fluoro cytidine
  modified_base 5: mod_base = OTHER; note = 2'O-methyl uridine
  modified_base 6: mod_base = OTHER; note = 2'-fluoro guanosine
  modified_base 7: mod_base = OTHER; note = 2'O-methyl uridine
  modified_base 8: mod_base = OTHER; note = 2'-fluoro guanosine
  modified_base 9: mod_base = OTHER; note = 2'O-methyl adenosine
  modified_base 10: mod_base = OTHER; note = 2'-fluoro guanosine
  modified_base 11: mod_base = OTHER; note = 2'O-methyl guanosine
  modified_base 12: mod_base = OTHER; note = 2'-fluoro uridine
  modified_base 13: mod_base = OTHER; note = 2'O-methyl cytidine
  modified_base 14: mod_base = OTHER; note = 2'-fluoro adenosine
  modified_base 15: mod_base = OTHER; note = 2'O-methyl cytidine
  modified_base 16: mod_base = OTHER; note = 2'-fluoro cytidine
  modified_base 17: mod_base = OTHER; note = 2'O-methyl cytidine
  modified_base 18: mod_base = OTHER; note = 2'-fluoro adenosine
  modified_base 19: mod_base = OTHER; note = 2'O-methyl cytidine
  modified_base 20: mod_base = OTHER; note = 2'-fluoro uridine
  modified_base 21: mod_base = OTHER; note = 2'O-methyl guanosine phosphorothioate
  modified_base 22: mod_base = OTHER; note = 2'O-methyl uridine phosphorothioate
  modified_base 23: mod_base = OTHER; note = 2'O-methyl uridine
cacctgtgaggtcacccactgtt

SEQ ID NO: 1933 - RNA, 23 nt, synthetic construct
  source 1..23: mol_type = other RNA
  modified_base 1: mod_base = OTHER; note = 5' vinyl phosphonate 2'O-methyl guanosine phosphorothioate
  modified_base 2: mod_base = OTHER; note = 2'-fluoro guanosine phosphorothioate
  modified_base 3: mod_base = OTHER; note = 2'O-methyl adenosine
  modified_base 4: mod_base = OTHER; note = 2'-fluoro guanosine
  modified_base 5: mod_base = OTHER; note = 2'O-methyl guanosine
  modified_base 6: mod_base = OTHER; note = 2'-fluoro cytidine
  modified_base 7: mod_base = OTHER; note = 2'O-methyl guanosine
  modified_base 8: mod_base = OTHER; note = 2'-fluoro guanosine
  modified_base 9: mod_base = OTHER; note = 2'O-methyl guanosine
  modified_base 10: mod_base = OTHER; note = 2'-fluoro guanosine
  modified_base 11: mod_base = OTHER; note = 2'O-methyl adenosine
  modified_base 12: mod_base = OTHER; note = 2'-fluoro guanosine
  modified_base 13: mod_base = OTHER; note = 2'O-methyl cytidine
  modified_base 14: mod_base = OTHER; note = 2'-fluoro adenosine
  modified_base 15: mod_base = OTHER; note = 2'O-methyl guanosine
  modified_base 16: mod_base = OTHER; note = 2'-fluoro adenosine
  modified_base 17: mod_base = OTHER; note = 2'O-methyl cytidine
  modified_base 18: mod_base = OTHER; note = 2'-fluoro adenosine
  modified_base 19: mod_base = OTHER; note = 2'O-methyl cytidine
  modified_base 20: mod_base = OTHER; note = 2'-fluoro adenosine
  modified_base 21: mod_base = OTHER; note = 2'O-methyl uridine phosphorothioate
  modified_base 22: mod_base = OTHER; note = 2'O-methyl uridine phosphorothioate
  modified_base 23: mod_base = OTHER; note = 2'O-methyl uridine
ggaggcggggagcagacacattt

SEQ ID NO: 1934 - RNA, 23 nt, synthetic construct
  source 1..23: mol_type = other RNA
  modified_base 1: mod_base = OTHER; note = 5' vinyl phosphonate 2'O-methyl uridine phosphorothioate
  modified_base 2: mod_base = OTHER; note = 2'-fluoro guanosine phosphorothioate
  modified_base 3: mod_base = OTHER; note = 2'O-methyl guanosine
  modified_base 4: mod_base = OTHER; note = 2'-fluoro adenosine
  modified_base 5: mod_base = OTHER; note = 2'O-methyl guanosine
  modified_base 6: mod_base = OTHER; note = 2'-fluoro guanosine
  modified_base 7: mod_base = OTHER; note = 2'O-methyl cytidine
  modified_base 8: mod_base = OTHER; note = 2'-fluoro guanosine
  modified_base 9: mod_base = OTHER; note = 2'O-methyl guanosine
  modified_base 10: mod_base = OTHER; note = 2'-fluoro guanosine
  modified_base 11: mod_base = OTHER; note = 2'O-methyl guanosine
  modified_base 12: mod_base = OTHER; note = 2'-fluoro adenosine
  modified_base 13: mod_base = OTHER; note = 2'O-methyl guanosine
  modified_base 14: mod_base = OTHER; note = 2'-fluoro cytidine
  modified_base 15: mod_base = OTHER; note = 2'O-methyl adenosine
  modified_base 16: mod_base = OTHER; note = 2'-fluoro guanosine
  modified_base 17: mod_base = OTHER; note = 2'O-methyl adenosine
  modified_base 18: mod_base = OTHER; note = 2'-fluoro cytidine
  modified_base 19: mod_base = OTHER; note = 2'O-methyl adenosine
  modified_base 20: mod_base = OTHER; note = 2'-fluoro cytidine
  modified_base 21: mod_base = OTHER; note = 2'O-methyl adenosine phosphorothioate
  modified_base 22: mod_base = OTHER; note = 2'O-methyl uridine phosphorothioate
  modified_base 23: mod_base = OTHER; note = 2'O-methyl uridine
tggaggcggggagcagacacatt

SEQ ID NO: 1935 - RNA, 21 nt, synthetic construct
  source 1..21: mol_type = other RNA
  modified_base 1: mod_base = OTHER; note = 2'O-methyl uridine phosphorothioate
  modified_base 2: mod_base = OTHER; note = 2'-fluoro uridine phosphorothioate
  modified_base 3: mod_base = OTHER; note = 2'O-methyl guanosine
  modified_base 4: mod_base = OTHER; note = 2'O-methyl uridine
  modified_base 5: mod_base = OTHER; note = 2'O-methyl cytidine
  modified_base 6: mod_base = OTHER; note = 2'-fluoro adenosine
  modified_base 7: mod_base = OTHER; note = 2'O-methyl cytidine
  modified_base 8: mod_base = OTHER; note = 2'O-methyl uridine
  modified_base 9: mod_base = OTHER; note = 2'O-methyl cytidine
  modified_base 10: mod_base = OTHER; note = 2'O-methyl adenosine
  modified_base 11: mod_base = OTHER; note = 2'O-methyl cytidine
  modified_base 12: mod_base = OTHER; note = 2'O-methyl uridine
  modified_base 13: mod_base = OTHER; note = 2'O-methyl cytidine
  modified_base 14: mod_base = OTHER; note = 2'-fluoro cytidine
  modified_base 15: mod_base = OTHER; note = 2'O-methyl uridine
  modified_base 16: mod_base = OTHER; note = 2'-fluoro cytidine
  modified_base 17: mod_base = OTHER; note = 2'O-methyl cytidine
  modified_base 18: mod_base = OTHER; note = 2'O-methyl adenosine
  modified_base 19: mod_base = OTHER; note = 2'O-methyl uridine phosphorothioate
  modified_base 20: mod_base = OTHER; note = 2'O-methyl uridine phosphorothioate
  modified_base 21: mod_base = OTHER; note = 2'O-methyl uridine
ttgtcactcactcctccattt

SEQ ID NO: 1936 - RNA, 21 nt, synthetic construct
  source 1..21: mol_type = other RNA
  modified_base 1: mod_base = OTHER; note = 2'O-methyl cytidine phosphorothioate
  modified_base 2: mod_base = OTHER; note = 2'-fluoro adenosine phosphorothioate
  modified_base 3: mod_base = OTHER; note = 2'O-methyl guanosine
  modified_base 4: mod_base = OTHER; note = 2'O-methyl guanosine
  modified_base 5: mod_base = OTHER; note = 2'O-methyl adenosine
  modified_base 6: mod_base = OTHER; note = 2'-fluoro adenosine
  modified_base 7: mod_base = OTHER; note = 2'O-methyl cytidine
  modified_base 8: mod_base = OTHER; note = 2'O-methyl adenosine
  modified_base 9: mod_base = OTHER; note = 2'O-methyl uridine
  modified_base 10: mod_base = OTHER; note = 2'O-methyl adenosine
  modified_base 11: mod_base = OTHER; note = 2'O-methyl cytidine
  modified_base 12: mod_base = OTHER; note = 2'O-methyl cytidine
  modified_base 13: mod_base = OTHER; note = 2'O-methyl adenosine
  modified_base 14: mod_base = OTHER; note = 2'-fluoro adenosine
  modified_base 15: mod_base = OTHER; note = 2'O-methyl guanosine
  modified_base 16: mod_base = OTHER; note = 2'-fluoro guanosine
  modified_base 17: mod_base = OTHER; note = 2'O-methyl cytidine
  modified_base 18: mod_base = OTHER; note = 2'O-methyl adenosine
  modified_base 19: mod_base = OTHER; note = 2'O-methyl uridine phosphorothioate
  modified_base 20: mod_base = OTHER; note = 2'O-methyl uridine phosphorothioate
  modified_base 21: mod_base = OTHER; note = 2'O-methyl uridine
caggaacataccaaggcattt

SEQ ID NO: 1937 - RNA, 21 nt, synthetic construct
  source 1..21: mol_type = other RNA
  modified_base 1: mod_base = OTHER; note = 2'O-methyl adenosine phosphorothioate
  modified_base 2: mod_base = OTHER; note = 2'-fluoro adenosine phosphorothioate
  modified_base 3: mod_base = OTHER; note = 2'O-methyl guanosine
  modified_base 4: mod_base = OTHER; note = 2'O-methyl uridine
  modified_base 5: mod_base = OTHER; note = 2'O-methyl cytidine
  modified_base 6: mod_base = OTHER; note = 2'-fluoro adenosine
  modified_base 7: mod_base = OTHER; note = 2'O-methyl guanosine
  modified_base 8: mod_base = OTHER; note = 2'O-methyl adenosine
  modified_base 9: mod_base = OTHER; note = 2'O-methyl cytidine
  modified_base 10: mod_base = OTHER; note = 2'O-methyl adenosine
  modified_base 11: mod_base = OTHER; note = 2'O-methyl cytidine
  modified_base 12: mod_base = OTHER; note = 2'O-methyl cytidine
  modified_base 13: mod_base = OTHER; note = 2'O-methyl adenosine
  modified_base 14: mod_base = OTHER; note = 2'-fluoro guanosine
  modified_base 15: mod_base = OTHER; note = 2'O-methyl adenosine
  modified_base 16: mod_base = OTHER; note = 2'-fluoro adenosine
  modified_base 17: mod_base = OTHER; note = 2'O-methyl cytidine
  modified_base 18: mod_base = OTHER; note = 2'O-methyl guanosine
  modified_base 19: mod_base = OTHER; note = 2'O-methyl uridine phosphorothioate
  modified_base 20: mod_base = OTHER; note = 2'O-methyl uridine phosphorothioate
  modified_base 21: mod_base = OTHER; note = 2'O-methyl uridine
aagtcagacaccagaacgttt

SEQ ID NO: 1938 - RNA, 21 nt, synthetic construct
  source 1..21: mol_type = other RNA
  modified_base 1: mod_base = OTHER; note = 2'O-methyl uridine phosphorothioate
  modified_base 2: mod_base = OTHER; note = 2'-fluoro uridine phosphorothioate
  modified_base 3: mod_base = OTHER; note = 2'O-methyl guanosine
  modified_base 4: mod_base = OTHER; note = 2'O-methyl guanosine
  modified_base 5: mod_base = OTHER; note = 2'O-methyl adenosine
  modified_base 6: mod_base = OTHER; note = 2'-fluoro cytidine
  modified_base 7: mod_base = OTHER; note = 2'O-methyl cytidine
  modified_base 8: mod_base = OTHER; note = 2'O-methyl guanosine
  modified_base 9: mod_base = OTHER; note = 2'O-methyl adenosine
  modified_base 10: mod_base = OTHER; note = 2'O-methyl adenosine
  modified_base 11: mod_base = OTHER; note = 2'O-methyl adenosine
  modified_base 12: mod_base = OTHER; note = 2'O-methyl guanosine
  modified_base 13: mod_base = OTHER; note = 2'O-methyl uridine
  modified_base 14: mod_base = OTHER; note = 2'-fluoro cytidine
  modified_base 15: mod_base = OTHER; note = 2'O-methyl adenosine
  modified_base 16: mod_base = OTHER; note = 2'-fluoro guanosine
  modified_base 17: mod_base = OTHER; note = 2'O-methyl adenosine
  modified_base 18: mod_base = OTHER; note = 2'O-methyl cytidine
  modified_base 19: mod_base = OTHER; note = 2'O-methyl adenosine phosphorothioate
  modified_base 20: mod_base = OTHER; note = 2'O-methyl uridine phosphorothioate
  modified_base 21: mod_base = OTHER; note = 2'O-methyl uridine
ttggaccgaaagtcagacatt

SEQ ID NO: 1939 - RNA, 21 nt, synthetic construct
  source 1..21: mol_type = other RNA
  modified_base 1: mod_base = OTHER; note = 2'O-methyl adenosine phosphorothioate
  modified_base 2: mod_base = OTHER; note = 2'-fluoro cytidine phosphorothioate
  modified_base 3: mod_base = OTHER; note = 2'O-methyl guanosine
  modified_base 4: mod_base = OTHER; note = 2'O-methyl adenosine
  modified_base 5: mod_base = OTHER; note = 2'O-methyl cytidine
  modified_base 6: mod_base = OTHER; note = 2'-fluoro uridine
  modified_base 7: mod_base = OTHER; note = 2'O-methyl uridine
  modified_base 8: mod_base = OTHER; note = 2'O-methyl cytidine
  modified_base 9: mod_base = OTHER; note = 2'O-methyl guanosine
  modified_base 10: mod_base = OTHER; note = 2'O-methyl uridine
  modified_base 11: mod_base = OTHER; note = 2'O-methyl cytidine
  modified_base 12: mod_base = OTHER; note = 2'O-methyl uridine
  modified_base 13: mod_base = OTHER; note = 2'O-methyl uridine
  modified_base 14: mod_base = OTHER; note = 2'-fluoro uridine
  modified_base 15: mod_base = OTHER; note = 2'O-methyl guanosine
  modified_base 16: mod_base = OTHER; note = 2'-fluoro guanosine
  modified_base 17: mod_base = OTHER; note = 2'O-methyl adenosine
  modified_base 18: mod_base = OTHER; note = 2'O-methyl cytidine
  modified_base 19: mod_base = OTHER; note = 2'O-methyl cytidine phosphorothioate
  modified_base 20: mod_base = OTHER; note = 2'O-methyl uridine phosphorothioate
  modified_base 21: mod_base = OTHER; note = 2'O-methyl uridine
acgacttcgtctttggacctt

SEQ ID NO: 1940 - RNA, 21 nt, synthetic construct
  source 1..21: mol_type = other RNA
  modified_base 1: mod_base = OTHER; note = 2'O-methyl guanosine phosphorothioate
  modified_base 2: mod_base = OTHER; note = 2'-fluoro uridine phosphorothioate
  modified_base 3: mod_base = OTHER; note = 2'O-methyl adenosine
  modified_base 4: mod_base = OTHER; note = 2'O-methyl cytidine
  modified_base 5: mod_base = OTHER; note = 2'O-methyl guanosine
  modified_base 6: mod_base = OTHER; note = 2'-fluoro uridine
  modified_base 7: mod_base = OTHER; note = 2'O-methyl uridine
  modified_base 8: mod_base = OTHER; note = 2'O-methyl guanosine
  modified_base 9: mod_base = OTHER; note = 2'O-methyl uridine
  modified_base 10: mod_base = OTHER; note = 2'O-methyl cytidine
  modified_base 11: mod_base = OTHER; note = 2'O-methyl adenosine
  modified_base 12: mod_base = OTHER; note = 2'O-methyl cytidine
  modified_base 13: mod_base = OTHER; note = 2'O-methyl uridine
  modified_base 14: mod_base = OTHER; note = 2'-fluoro cytidine
  modified_base 15: mod_base = OTHER; note = 2'O-methyl adenosine
  modified_base 16: mod_base = OTHER; note = 2'-fluoro cytidine
  modified_base 17: mod_base = OTHER; note = 2'O-methyl uridine
  modified_base 18: mod_base = OTHER; note = 2'O-methyl cytidine
  modified_base 19: mod_base = OTHER; note = 2'O-methyl cytidine phosphorothioate
  modified_base 20: mod_base = OTHER; note = 2'O-methyl uridine phosphorothioate
  modified_base 21: mod_base = OTHER; note = 2'O-methyl uridine
gtacgttgtcactcactcctt

SEQ ID NO: 1941 - RNA, 21 nt, synthetic construct
  source 1..21: mol_type = other RNA
  modified_base 1: mod_base = OTHER; note = 2'O-methyl cytidine phosphorothioate
  modified_base 2: mod_base = OTHER; note = 2'-fluoro guanosine phosphorothioate
  modified_base 3: mod_base = OTHER; note = 2'O-methyl guanosine
  modified_base 4: mod_base = OTHER; note = 2'O-methyl uridine
  modified_base 5: mod_base = OTHER; note = 2'O-methyl guanosine
  modified_base 6: mod_base = OTHER; note = 2'-fluoro adenosine
  modified_base 7: mod_base = OTHER; note = 2'O-methyl uridine
  modified_base 8: mod_base = OTHER; note = 2'O-methyl guanosine
  modified_base 9: mod_base = OTHER; note = 2'O-methyl guanosine
  modified_base 10: mod_base = OTHER; note = 2'O-methyl uridine
  modified_base 11: mod_base = OTHER; note = 2'O-methyl uridine
  modified_base 12: mod_base = OTHER; note = 2'O-methyl guanosine
  modified_base 13: mod_base = OTHER; note = 2'O-methyl uridine
  modified_base 14: mod_base = OTHER; note = 2'-fluoro uridine
  modified_base 15: mod_base = OTHER; note = 2'O-methyl uridine
  modified_base 16: mod_base = OTHER; note = 2'-fluoro uridine
  modified_base 17: mod_base = OTHER; note = 2'O-methyl guanosine
  modified_base 18: mod_base = OTHER; note = 2'O-methyl guanosine
  modified_base 19: mod_base = OTHER; note = 2'O-methyl cytidine phosphorothioate
  modified_base 20: mod_base = OTHER; note = 2'O-methyl uridine phosphorothioate
  modified_base 21: mod_base = OTHER; note = 2'O-methyl uridine
cggtgatggttgttttggctt

SEQ ID NO: 1942 - RNA, 21 nt, synthetic construct
  source 1..21: mol_type = other RNA
  modified_base 1: mod_base = OTHER; note = 2'O-methyl adenosine phosphorothioate
  modified_base 2: mod_base = OTHER; note = 2'-fluoro cytidine phosphorothioate
  modified_base 3: mod_base = OTHER; note = 2'O-methyl cytidine
  modified_base 4: mod_base = OTHER; note = 2'O-methyl guanosine
  modified_base 5: mod_base = OTHER; note = 2'O-methyl adenosine
  modified_base 6: mod_base = OTHER; note = 2'-fluoro adenosine
  modified_base 7: mod_base = OTHER; note = 2'O-methyl adenosine
  modified_base 8: mod_base = OTHER; note = 2'O-methyl guanosine
  modified_base 9: mod_base = OTHER; note = 2'O-methyl uridine
  modified_base 10: mod_base = OTHER; note = 2'O-methyl cytidine
  modified_base 11: mod_base = OTHER; note = 2'O-methyl adenosine
  modified_base 12: mod_base = OTHER; note = 2'O-methyl guanosine
  modified_base 13: mod_base = OTHER; note = 2'O-methyl adenosine
  modified_base 14: mod_base = OTHER; note = 2'-fluoro cytidine
  modified_base 15: mod_base = OTHER; note = 2'O-methyl adenosine
  modified_base 16: mod_base = OTHER; note = 2'-fluoro cytidine
  modified_base 17: mod_base = OTHER; note = 2'O-methyl cytidine
  modified_base 18: mod_base = OTHER; note = 2'O-methyl adenosine
  modified_base 19: mod_base = OTHER; note = 2'O-methyl guanosine phosphorothioate
  modified_base 20: mod_base = OTHER; note = 2'O-methyl uridine phosphorothioate
  modified_base 21: mod_base = OTHER; note = 2'O-methyl uridine
accgaaagtcagacaccagtt

SEQ ID NO: 1943 - RNA, 21 nt, synthetic construct
  source 1..21: mol_type = other RNA
  modified_base 1: mod_base = OTHER; note = 2'O-methyl adenosine phosphorothioate
  modified_base 2: mod_base = OTHER; note = 2'-fluoro adenosine phosphorothioate
  modified_base 3: mod_base = OTHER; note = 2'O-methyl adenosine
  modified_base 4: mod_base = OTHER; note = 2'O-methyl guanosine
  modified_base 5: mod_base = OTHER; note = 2'O-methyl uridine
  modified_base 6: mod_base = OTHER; note = 2'-fluoro cytidine
  modified_base 7: mod_base = OTHER; note = 2'O-methyl adenosine
  modified_base 8: mod_base = OTHER; note = 2'O-methyl guanosine
  modified_base 9: mod_base = OTHER; note = 2'O-methyl adenosine
  modified_base 10: mod_base = OTHER; note = 2'O-methyl cytidine
  modified_base 11: mod_base = OTHER; note = 2'O-methyl adenosine
  modified_base 12: mod_base = OTHER; note = 2'O-methyl cytidine
  modified_base 13: mod_base = OTHER; note = 2'O-methyl cytidine
  modified_base 14: mod_base = OTHER; note = 2'-fluoro adenosine
  modified_base 15: mod_base = OTHER; note = 2'O-methyl guanosine
  modified_base 16: mod_base = OTHER; note = 2'-fluoro adenosine
  modified_base 17: mod_base = OTHER; note = 2'O-methyl adenosine
  modified_base 18: mod_base = OTHER; note = 2'O-methyl cytidine
  modified_base 19: mod_base = OTHER; note = 2'O-methyl guanosine phosphorothioate
  modified_base 20: mod_base = OTHER; note = 2'O-methyl uridine phosphorothioate
  modified_base 21: mod_base = OTHER; note = 2'O-methyl uridine
aaagtcagacaccagaacgtt

SEQ ID NO: 1944 - RNA, 21 nt, synthetic construct
  source 1..21: mol_type = other RNA
  modified_base 1: mod_base = OTHER; note = 2'O-methyl uridine phosphorothioate
  modified_base 2: mod_base = OTHER; note = 2'-fluoro uridine phosphorothioate
  modified_base 3: mod_base = OTHER; note = 2'O-methyl guanosine
  modified_base 4: mod_base = OTHER; note = 2'O-methyl adenosine
  modified_base 5: mod_base = OTHER; note = 2'O-methyl cytidine
  modified_base 6: mod_base = OTHER; note = 2'-fluoro uridine
  modified_base 7: mod_base = OTHER; note = 2'O-methyl uridine
  modified_base 8: mod_base = OTHER; note = 2'O-methyl uridine
  modified_base 9: mod_base = OTHER; note = 2'O-methyl adenosine
  modified_base 10: mod_base = OTHER; note = 2'O-methyl guanosine
  modified_base 11: mod_base = OTHER; note = 2'O-methyl guanosine
  modified_base 12: mod_base = OTHER; note = 2'O-methyl guanosine
  modified_base 13: mod_base = OTHER; note = 2'O-methyl cytidine
  modified_base 14: mod_base = OTHER; note = 2'-fluoro adenosine
  modified_base 15: mod_base = OTHER; note = 2'O-methyl guanosine
  modified_base 16: mod_base = OTHER; note = 2'-fluoro adenosine
  modified_base 17: mod_base = OTHER; note = 2'O-methyl uridine
  modified_base 18: mod_base = OTHER; note = 2'O-methyl guanosine
  modified_base 19: mod_base = OTHER; note = 2'O-methyl uridine phosphorothioate
  modified_base 20: mod_base = OTHER; note = 2'O-methyl uridine phosphorothioate
  modified_base 21: mod_base = OTHER; note = 2'O-methyl uridine
ttgactttagggcagatgttt

SEQ ID NO: 1945 - RNA, 21 nt, synthetic construct
  source 1..21: mol_type = other RNA
  modified_base 1: mod_base = OTHER; note = 2'O-methyl adenosine phosphorothioate
  modified_base 2: mod_base = OTHER; note = 2'-fluoro guanosine phosphorothioate
  modified_base 3: mod_base = OTHER; note = 2'O-methyl adenosine
  modified_base 4: mod_base = OTHER; note = 2'O-methyl cytidine
  modified_base 5: mod_base = OTHER; note = 2'O-methyl adenosine
  modified_base 6: mod_base = OTHER; note = 2'-fluoro cytidine
  modified_base 7: mod_base = OTHER; note = 2'O-methyl cytidine
  modified_base 8: mod_base = OTHER; note = 2'O-methyl adenosine
  modified_base 9: mod_base = OTHER; note = 2'O-methyl guanosine
  modified_base 10: mod_base = OTHER; note = 2'O-methyl adenosine
  modified_base 11: mod_base = OTHER; note = 2'O-methyl adenosine
  modified_base 12: mod_base = OTHER; note = 2'O-methyl cytidine
  modified_base 13: mod_base = OTHER; note = 2'O-methyl guanosine
  modified_base 14: mod_base = OTHER; note = 2'-fluoro uridine
  modified_base 15: mod_base = OTHER; note = 2'O-methyl uridine
  modified_base 16: mod_base = OTHER; note = 2'-fluoro uridine
  modified_base 17: mod_base = OTHER; note = 2'O-methyl uridine
  modified_base 18: mod_base = OTHER; note = 2'O-methyl cytidine
  modified_base 19: mod_base = OTHER; note = 2'O-methyl cytidine phosphorothioate
  modified_base 20: mod_base = OTHER; note = 2'O-methyl uridine phosphorothioate
  modified_base 21: mod_base = OTHER; note = 2'O-methyl uridine
agacaccagaacgttttcctt

SEQ ID NO: 1946 - RNA, 21 nt, synthetic construct
  source 1..21: mol_type = other RNA
  modified_base 1: mod_base = OTHER; note = 2'O-methyl uridine phosphorothioate
  modified_base 2: mod_base = OTHER; note = 2'-fluoro uridine phosphorothioate
  modified_base 3: mod_base = OTHER; note = 2'O-methyl uridine
  modified_base 4: mod_base = OTHER; note = 2'O-methyl guanosine
  modified_base 5: mod_base = OTHER; note = 2'O-methyl guanosine
  modified_base 6: mod_base = OTHER; note = 2'-fluoro adenosine
  modified_base 7: mod_base = OTHER; note = 2'O-methyl cytidine
  modified_base 8: mod_base = OTHER; note = 2'O-methyl cytidine
  modified_base 9: mod_base = OTHER; note = 2'O-methyl guanosine
  modified_base 10: mod_base = OTHER; note = 2'O-methyl adenosine
  modified_base 11: mod_base = OTHER; note = 2'O-methyl adenosine
  modified_base 12: mod_base = OTHER; note = 2'O-methyl adenosine
  modified_base 13: mod_base = OTHER; note = 2'O-methyl guanosine
  modified_base 14: mod_base = OTHER; note = 2'-fluoro uridine
  modified_base 15: mod_base = OTHER; note = 2'O-methyl cytidine
  modified_base 16: mod_base = OTHER; note = 2'-fluoro adenosine
  modified_base 17: mod_base = OTHER; note = 2'O-methyl guanosine
  modified_base 18: mod_base = OTHER; note = 2'O-methyl adenosine
  modified_base 19: mod_base = OTHER; note = 2'O-methyl cytidine phosphorothioate
  modified_base 20: mod_base = OTHER; note = 2'O-methyl uridine phosphorothioate
  modified_base 21: mod_base = OTHER; note = 2'O-methyl uridine
tttggaccgaaagtcagactt

SEQ ID NO: 1947 - RNA, 21 nt, synthetic construct
  source 1..21: mol_type = other RNA
  modified_base 1: mod_base = OTHER; note = 2'O-methyl guanosine phosphorothioate
  modified_base 2: mod_base = OTHER; note = 2'-fluoro uridine phosphorothioate
  modified_base 3: mod_base = OTHER; note = 2'O-methyl cytidine
  modified_base 4: mod_base = OTHER; note = 2'O-methyl adenosine
  modified_base 5: mod_base = OTHER; note = 2'O-methyl guanosine
  modified_base 6: mod_base = OTHER; note = 2'-fluoro adenosine
  modified_base 7: mod_base = OTHER; note = 2'O-methyl cytidine
  modified_base 8: mod_base = OTHER; note = 2'O-methyl adenosine
  modified_base 9: mod_base = OTHER; note = 2'O-methyl cytidine
  modified_base 10: mod_base = OTHER; note = 2'O-methyl cytidine
  modified_base 11: mod_base = OTHER; note = 2'O-methyl adenosine
  modified_base 12: mod_base = OTHER; note = 2'O-methyl guanosine
  modified_base 13: mod_base = OTHER; note = 2'O-methyl adenosine
  modified_base 14: mod_base = OTHER; note = 2'-fluoro adenosine
  modified_base 15: mod_base = OTHER; note = 2'O-methyl cytidine
  modified_base 16: mod_base = OTHER; note = 2'-fluoro guanosine
  modified_base 17: mod_base = OTHER; note = 2'O-methyl uridine
  modified_base 18: mod_base = OTHER; note = 2'O-methyl uridine
  modified_base 19: mod_base = OTHER; note = 2'O-methyl uridine phosphorothioate
  modified_base 20: mod_base = OTHER; note = 2'O-methyl uridine phosphorothioate
  modified_base 21: mod_base = OTHER; note = 2'O-methyl uridine
gtcagacaccagaacgttttt

SEQ ID NO: 1948 - RNA, 21 nt, synthetic construct
  source 1..21: mol_type = other RNA
  modified_base 1: mod_base = OTHER; note = 2'O-methyl adenosine phosphorothioate
  modified_base 2: mod_base = OTHER; note = 2'-fluoro adenosine phosphorothioate
  modified_base 3: mod_base = OTHER; note = 2'O-methyl uridine
  modified_base 4: mod_base = OTHER; note = 2'O-methyl guanosine
  modified_base 5: mod_base = OTHER; note = 2'O-methyl guanosine
  modified_base 6: mod_base = OTHER; note = 2'-fluoro cytidine
  modified_base 7: mod_base = OTHER; note = 2'O-methyl adenosine
  modified_base 8: mod_base = OTHER; note = 2'O-methyl guanosine
  modified_base 9: mod_base = OTHER; note = 2'O-methyl adenosine
  modified_base 10: mod_base = OTHER; note = 2'O-methyl uridine
  modified_base 11: mod_base = OTHER; note = 2'O-methyl uridine
  modified_base 12: mod_base = OTHER; note = 2'O-methyl cytidine
  modified_base 13: mod_base = OTHER; note = 2'O-methyl cytidine
  modified_base 14: mod_base = OTHER; note = 2'-fluoro adenosine
  modified_base 15: mod_base = OTHER; note = 2'O-methyl cytidine
  modified_base 16: mod_base = OTHER; note = 2'-fluoro adenosine
  modified_base 17: mod_base = OTHER; note = 2'O-methyl guanosine
  modified_base 18: mod_base = OTHER; note = 2'O-methyl guanosine
  modified_base 19: mod_base = OTHER; note = 2'O-methyl cytidine phosphorothioate
  modified_base 20: mod_base = OTHER; note = 2'O-methyl uridine phosphorothioate
  modified_base 21: mod_base = OTHER; note = 2'O-methyl uridine
aatggcagattccacaggctt

SEQ ID NO: 1949 - RNA, 21 nt, synthetic construct
  source 1..21: mol_type = other RNA
  modified_base 1: mod_base = OTHER; note = 2'O-methyl adenosine phosphorothioate
  modified_base 2: mod_base = OTHER; note = 2'-fluoro adenosine phosphorothioate
  modified_base 3: mod_base = OTHER; note = 2'O-methyl guanosine
  modified_base 4: mod_base = OTHER; note = 2'O-methyl adenosine
  modified_base 5: mod_base = OTHER; note = 2'O-methyl cytidine
  modified_base 6: mod_base = OTHER; note = 2'-fluoro adenosine
  modified_base 7: mod_base = OTHER; note = 2'O-methyl uridine
  modified_base 8: mod_base = OTHER; note = 2'O-methyl uridine
  modified_base 9: mod_base = OTHER; note = 2'O-methyl adenosine
  modified_base 10: mod_base = OTHER; note = 2'O-methyl uridine
  modified_base 11: mod_base = OTHER; note = 2'O-methyl cytidine
  modified_base 12: mod_base = OTHER; note = 2'O-methyl cytidine
  modified_base 13: mod_base = OTHER; note = 2'O-methyl uridine
  modified_base 14: mod_base = OTHER; note = 2'-fluoro adenosine
  modified_base 15: mod_base = OTHER; note = 2'O-methyl adenosine
  modified_base 16: mod_base = OTHER; note = 2'-fluoro uridine
  modified_base 17: mod_base = OTHER; note = 2'O-methyl guanosine
  modified_base 18: mod_base = OTHER; note = 2'O-methyl guanosine
  modified_base 19: mod_base = OTHER; note = 2'O-methyl guanosine phosphorothioate
  modified_base 20: mod_base = OTHER; note = 2'O-methyl uridine phosphorothioate
  modified_base 21: mod_base = OTHER; note = 2'O-methyl uridine
aagacattatcctaatgggtt

SEQ ID NO: 1950 - RNA, 21 nt, synthetic construct
  source 1..21: mol_type = other RNA
  modified_base 1: mod_base = OTHER; note = 2'O-methyl adenosine phosphorothioate
  modified_base 2: mod_base = OTHER; note = 2'-fluoro adenosine phosphorothioate
  modified_base 3: mod_base = OTHER; note = 2'O-methyl cytidine
  modified_base 4: mod_base = OTHER; note = 2'O-methyl adenosine
  modified_base 5: mod_base = OTHER; note = 2'O-methyl uridine
  modified_base 6: mod_base = OTHER; note = 2'-fluoro adenosine
  modified_base 7: mod_base = OTHER; note = 2'O-methyl cytidine
  modified_base 8: mod_base = OTHER; note = 2'O-methyl cytidine
  modified_base 9: mod_base = OTHER; note = 2'O-methyl adenosine
  modified_base 10: mod_base = OTHER; note = 2'O-methyl adenosine
  modified_base 11: mod_base = OTHER; note = 2'O-methyl guanosine
  modified_base 12: mod_base = OTHER; note = 2'O-methyl guanosine
  modified_base 13: mod_base = OTHER; note = 2'O-methyl cytidine
  modified_base 14: mod_base = OTHER; note = 2'-fluoro adenosine
  modified_base 15: mod_base = OTHER; note = 2'O-methyl uridine
  modified_base 16: mod_base = OTHER; note = 2'-fluoro cytidine
  modified_base 17: mod_base = OTHER; note = 2'O-methyl cytidine
  modified_base 18: mod_base = OTHER; note = 2'O-methyl adenosine
  modified_base 19: mod_base = OTHER; note = 2'O-methyl cytidine phosphorothioate
  modified_base 20: mod_base = OTHER; note = 2'O-methyl uridine phosphorothioate
  modified_base 21: mod_base = OTHER; note = 2'O-methyl uridine
aacataccaaggcatccactt

SEQ ID NO: 1951 - RNA, 21 nt, synthetic construct
  source 1..21: mol_type = other RNA
  modified_base 1: mod_base = OTHER; note = 2'O-methyl adenosine phosphorothioate
  modified_base 2: mod_base = OTHER; note = 2'-fluoro uridine phosphorothioate
  modified_base 3: mod_base = OTHER; note = 2'O-methyl cytidine
  modified_base 4: mod_base = OTHER; note = 2'O-methyl cytidine
  modified_base 5: mod_base = OTHER; note = 2'O-methyl adenosine
  modified_base 6: mod_base = OTHER; note = 2'-fluoro cytidine
  modified_base 7: mod_base = OTHER; note = 2'O-methyl guanosine
  modified_base 8: mod_base = OTHER; note = 2'O-methyl adenosine
  modified_base 9: mod_base = OTHER; note = 2'O-methyl cytidine
  modified_base 10: mod_base = OTHER; note = 2'O-methyl uridine
  modified_base 11: mod_base = OTHER; note = 2'O-methyl uridine
  modified_base 12: mod_base = OTHER; note = 2'O-methyl cytidine
  modified_base 13: mod_base = OTHER; note = 2'O-methyl guanosine
  modified_base 14: mod_base = OTHER; note = 2'-fluoro uridine
  modified_base 15: mod_base = OTHER; note = 2'O-methyl cytidine
  modified_base 16: mod_base = OTHER; note = 2'-fluoro uridine
  modified_base 17: mod_base = OTHER; note = 2'O-methyl uridine
  modified_base 18: mod_base = OTHER; note = 2'O-methyl uridine
  modified_base 19: mod_base = OTHER; note = 2'O-methyl guanosine phosphorothioate
  modified_base 20: mod_base = OTHER; note = 2'O-methyl uridine phosphorothioate
  modified_base 21: mod_base = OTHER; note = 2'O-methyl uridine
atccacgacttcgtctttgtt

SEQ ID NO: 1952 - RNA, 21 nt, synthetic construct
  source 1..21: mol_type = other RNA
  modified_base 1: mod_base = OTHER; note = 2'O-methyl guanosine phosphorothioate
  modified_base 2: mod_base = OTHER; note = 2'-fluoro adenosine phosphorothioate
  modified_base 3: mod_base = OTHER; note = 2'O-methyl adenosine
  modified_base 4: mod_base = OTHER; note = 2'O-methyl cytidine
  modified_base 5: mod_base = OTHER; note = 2'O-methyl adenosine
  modified_base 6: mod_base = OTHER; note = 2'-fluoro uridine
  modified_base 7: mod_base = OTHER; note = 2'O-methyl adenosine
  modified_base 8: mod_base = OTHER; note = 2'O-methyl cytidine
  modified_base 9: mod_base = OTHER; note = 2'O-methyl cytidine
  modified_base 10: mod_base = OTHER; note = 2'O-methyl adenosine
  modified_base 11: mod_base = OTHER; note = 2'O-methyl adenosine
  modified_base 12: mod_base = OTHER; note = 2'O-methyl guanosine
  modified_base 13: mod_base = OTHER; note = 2'O-methyl guanosine
  modified_base 14: mod_base = OTHER; note = 2'-fluoro cytidine
  modified_base 15: mod_base = OTHER; note = 2'O-methyl adenosine
  modified_base 16: mod_base = OTHER; note = 2'-fluoro uridine
  modified_base 17: mod_base = OTHER; note = 2'O-methyl cytidine
  modified_base 18: mod_base = OTHER; note = 2'O-methyl cytidine
  modified_base 19: mod_base = OTHER; note = 2'O-methyl adenosine phosphorothioate
  modified_base 20: mod_base = OTHER; note = 2'O-methyl uridine phosphorothioate
  modified_base 21: mod_base = OTHER; note = 2'O-methyl uridine
gaacataccaaggcatccatt

SEQ ID NO: 1953 - RNA, 21 nt, synthetic construct
  source 1..21: mol_type = other RNA
  modified_base 1: mod_base = OTHER; note = 5' vinyl phosphonate 2'O-methyl uridine phosphorothioate
  modified_base 2: mod_base = OTHER; note = 2'-fluoro uridine phosphorothioate
  modified_base 3: mod_base = OTHER; note = 2'O-methyl guanosine
  modified_base 4: mod_base = OTHER; note = 2'O-methyl uridine
  modified_base 5: mod_base = OTHER; note = 2'O-methyl cytidine
  modified_base 6: mod_base = OTHER; note = 2'-fluoro adenosine
  modified_base 7: mod_base = OTHER; note = 2'O-methyl cytidine
  modified_base 8: mod_base = OTHER; note = 2'O-methyl uridine
  modified_base 9: mod_base = OTHER; note = 2'O-methyl cytidine
  modified_base 10: mod_base = OTHER; note = 2'O-methyl adenosine
  modified_base 11: mod_base = OTHER; note = 2'O-methyl cytidine
  modified_base 12: mod_base = OTHER; note = 2'O-methyl uridine
  modified_base 13: mod_base = OTHER; note = 2'O-methyl cytidine
  modified_base 14: mod_base = OTHER; note = 2'-fluoro cytidine
  modified_base 15: mod_base = OTHER; note = 2'O-methyl uridine
  modified_base 16: mod_base = OTHER; note = 2'-fluoro cytidine
  modified_base 17: mod_base = OTHER; note = 2'O-methyl cytidine
  modified_base 18: mod_base = OTHER; note = 2'O-methyl adenosine
  modified_base 19: mod_base = OTHER; note = 2'O-methyl uridine phosphorothioate
  modified_base 20: mod_base = OTHER; note = 2'O-methyl uridine phosphorothioate
  modified_base 21: mod_base = OTHER; note = 2'O-methyl uridine
ttgtcactcactcctccattt

SEQ ID NO: 1954 - RNA, 21 nt, synthetic construct
  source 1..21: mol_type = other RNA
  modified_base 1: mod_base = OTHER; note = 5' vinyl phosphonate 2'O-methyl cytidine phosphorothioate
  modified_base 2: mod_base = OTHER; note = 2'-fluoro adenosine phosphorothioate
  modified_base 3: mod_base = OTHER; note = 2'O-methyl guanosine
  modified_base 4: mod_base = OTHER; note = 2'O-methyl guanosine
  modified_base 5: mod_base = OTHER; note = 2'O-methyl adenosine
  modified_base 6: mod_base = OTHER; note = 2'-fluoro adenosine
  modified_base 7: mod_base = OTHER; note = 2'O-methyl cytidine
  modified_base 8: mod_base = OTHER; note = 2'O-methyl adenosine
  modified_base 9: mod_base = OTHER; note = 2'O-methyl uridine
  modified_base 10: mod_base = OTHER; note = 2'O-methyl adenosine
  modified_base 11: mod_base = OTHER; note = 2'O-methyl cytidine
  modified_base 12: mod_base = OTHER; note = 2'O-methyl cytidine
  modified_base 13: mod_base = OTHER; note = 2'O-methyl adenosine
  modified_base 14: mod_base = OTHER; note = 2'-fluoro adenosine
  modified_base 15: mod_base = OTHER; note = 2'O-methyl guanosine
  modified_base 16: mod_base = OTHER; note = 2'-fluoro guanosine
  modified_base 17: mod_base = OTHER; note = 2'O-methyl cytidine
  modified_base 18: mod_base = OTHER; note = 2'O-methyl adenosine
  modified_base 19: mod_base = OTHER; note = 2'O-methyl uridine phosphorothioate
  modified_base 20: mod_base = OTHER; note = 2'O-methyl uridine phosphorothioate
  modified_base 21: mod_base = OTHER; note = 2'O-methyl uridine
caggaacataccaaggcattt

SEQ ID NO: 1955 - RNA, 21 nt, synthetic construct
  source 1..21: mol_type = other RNA
  modified_base 1: mod_base = OTHER; note = 5' vinyl phosphonate 2'O-methyl adenosine phosphorothioate
  modified_base 2: mod_base = OTHER; note = 2'-fluoro adenosine phosphorothioate
  modified_base 3: mod_base = OTHER; note = 2'O-methyl guanosine
  modified_base 4: mod_base = OTHER; note = 2'O-methyl uridine
  modified_base 5: mod_base = OTHER; note = 2'O-methyl cytidine
  modified_base 6: mod_base = OTHER; note = 2'-fluoro adenosine
  modified_base 7: mod_base = OTHER; note = 2'O-methyl guanosine
  modified_base 8: mod_base = OTHER; note = 2'O-methyl adenosine
  modified_base 9: mod_base = OTHER; note = 2'O-methyl cytidine
  modified_base 10: mod_base = OTHER; note = 2'O-methyl adenosine
  modified_base 11: mod_base = OTHER; note = 2'O-methyl cytidine
  modified_base 12: mod_base = OTHER; note = 2'O-methyl cytidine
  modified_base 13: mod_base = OTHER; note = 2'O-methyl adenosine
  modified_base 14: mod_base = OTHER; note = 2'-fluoro guanosine
  modified_base 15: mod_base = OTHER; note = 2'O-methyl adenosine
  modified_base 16: mod_base = OTHER; note = 2'-fluoro adenosine
  modified_base 17: mod_base = OTHER; note = 2'O-methyl cytidine
  modified_base 18: mod_base = OTHER; note = 2'O-methyl guanosine
  modified_base 19: mod_base = OTHER; note = 2'O-methyl uridine phosphorothioate
  modified_base 20: mod_base = OTHER; note = 2'O-methyl uridine phosphorothioate
  modified_base 21: mod_base = OTHER; note = 2'O-methyl uridine
aagtcagacaccagaacgttt

SEQ ID NO: 1956 - RNA, 21 nt, synthetic construct
  source 1..21: mol_type = other RNA
  modified_base 1: mod_base = OTHER; note = 5' vinyl phosphonate 2'O-methyl uridine phosphorothioate
  modified_base 2: mod_base = OTHER; note = 2'-fluoro uridine phosphorothioate
  modified_base 3: mod_base = OTHER; note = 2'O-methyl guanosine
  modified_base 4: mod_base = OTHER; note = 2'O-methyl guanosine
  modified_base 5: mod_base = OTHER; note = 2'O-methyl adenosine
  modified_base 6: mod_base = OTHER; note = 2'-fluoro cytidine
  modified_base 7: mod_base = OTHER; note = 2'O-methyl cytidine
  modified_base 8: mod_base = OTHER; note = 2'O-methyl guanosine
  modified_base 9: mod_base = OTHER; note = 2'O-methyl adenosine
  modified_base 10: mod_base = OTHER; note = 2'O-methyl adenosine
  modified_base 11: mod_base = OTHER; note = 2'O-methyl adenosine
  modified_base 12: mod_base = OTHER; note = 2'O-methyl guanosine
  modified_base 13: mod_base = OTHER; note = 2'O-methyl uridine
  modified_base 14: mod_base = OTHER; note = 2'-fluoro cytidine
  modified_base 15: mod_base = OTHER; note = 2'O-methyl adenosine
  modified_base 16: mod_base = OTHER; note = 2'-fluoro guanosine
  modified_base 17: mod_base = OTHER; note = 2'O-methyl adenosine
  modified_base 18: mod_base = OTHER; note = 2'O-methyl cytidine
  modified_base 19: mod_base = OTHER; note = 2'O-methyl adenosine phosphorothioate
  modified_base 20: mod_base = OTHER; note = 2'O-methyl uridine phosphorothioate
  modified_base 21: mod_base = OTHER; note = 2'O-methyl uridine
ttggaccgaaagtcagacatt

SEQ ID NO: 1957 - RNA, 21 nt, synthetic construct
  source 1..21: mol_type = other RNA
  modified_base 1: mod_base = OTHER; note = 5' vinyl phosphonate 2'O-methyl adenosine phosphorothioate
  modified_base 2: mod_base = OTHER; note = 2'-fluoro cytidine phosphorothioate
  modified_base 3: mod_base = OTHER; note = 2'O-methyl guanosine
  modified_base 4: mod_base = OTHER; note = 2'O-methyl adenosine
  modified_base 5: mod_base = OTHER; note = 2'O-methyl cytidine
  modified_base 6: mod_base = OTHER; note = 2'-fluoro uridine
  modified_base 7: mod_base = OTHER; note = 2'O-methyl uridine
  modified_base 8: mod_base = OTHER; note = 2'O-methyl cytidine
  modified_base 9: mod_base = OTHER; note = 2'O-methyl guanosine
  modified_base 10: mod_base = OTHER; note = 2'O-methyl uridine
  modified_base 11: mod_base = OTHER; note = 2'O-methyl cytidine
  modified_base 12: mod_base = OTHER; note = 2'O-methyl uridine
  modified_base 13: mod_base = OTHER; note = 2'O-methyl uridine
  modified_base 14: mod_base = OTHER; note = 2'-fluoro uridine
  modified_base 15: mod_base = OTHER; note = 2'O-methyl guanosine
  modified_base 16: mod_base = OTHER; note = 2'-fluoro guanosine
  modified_base 17: mod_base = OTHER; note = 2'O-methyl adenosine
  modified_base 18: mod_base = OTHER; note = 2'O-methyl cytidine
  modified_base 19: mod_base = OTHER; note = 2'O-methyl cytidine phosphorothioate
  modified_base 20: mod_base = OTHER; note = 2'O-methyl uridine phosphorothioate
  modified_base 21: mod_base = OTHER; note = 2'O-methyl uridine
acgacttcgtctttggacctt

SEQ ID NO: 1958 - RNA, 21 nt, synthetic construct
  source 1..21: mol_type = other RNA
  modified_base 1: mod_base = OTHER; note = 5' vinyl phosphonate 2'O-methyl guanosine phosphorothioate
  modified_base 2: mod_base = OTHER; note = 2'-fluoro uridine phosphorothioate
  modified_base 3: mod_base = OTHER; note = 2'O-methyl adenosine
  modified_base 4: mod_base = OTHER; note = 2'O-methyl cytidine
  modified_base 5: mod_base = OTHER; note = 2'O-methyl guanosine
  modified_base 6: mod_base = OTHER; note = 2'-fluoro uridine
  modified_base 7: mod_base = OTHER; note = 2'O-methyl uridine
  modified_base 8: mod_base = OTHER; note = 2'O-methyl guanosine
  modified_base 9: mod_base = OTHER; note = 2'O-methyl uridine
  modified_base 10: mod_base = OTHER; note = 2'O-methyl cytidine
  modified_base 11: mod_base = OTHER; note = 2'O-methyl adenosine
  modified_base 12: mod_base = OTHER; note = 2'O-methyl cytidine
  modified_base 13: mod_base = OTHER; note = 2'O-methyl uridine
  modified_base 14: mod_base = OTHER; note = 2'-fluoro cytidine
  modified_base 15: mod_base = OTHER; note = 2'O-methyl adenosine
  modified_base 16: mod_base = OTHER; note = 2'-fluoro cytidine
  modified_base 17: mod_base = OTHER; note = 2'O-methyl uridine
  modified_base 18: mod_base = OTHER; note = 2'O-methyl cytidine
  modified_base 19: mod_base = OTHER; note = 2'O-methyl cytidine phosphorothioate
  modified_base 20: mod_base = OTHER; note = 2'O-methyl uridine phosphorothioate
  modified_base 21: mod_base = OTHER; note = 2'O-methyl uridine
gtacgttgtcactcactcctt

SEQ ID NO: 1959 - RNA, 21 nt, synthetic construct
  source 1..21: mol_type = other RNA
  modified_base 1: mod_base = OTHER; note = 5' vinyl phosphonate 2'O-methyl cytidine phosphorothioate
  modified_base 2: mod_base = OTHER; note = 2'-fluoro guanosine phosphorothioate
  modified_base 3: mod_base = OTHER; note = 2'O-methyl guanosine
  modified_base 4: mod_base = OTHER; note = 2'O-methyl uridine
  modified_base 5: mod_base = OTHER; note = 2'O-methyl guanosine
  modified_base 6: mod_base = OTHER; note = 2'-fluoro adenosine
  modified_base 7: mod_base = OTHER; note = 2'O-methyl uridine
  modified_base 8: mod_base = OTHER; note = 2'O-methyl guanosine
  modified_base 9: mod_base = OTHER; note = 2'O-methyl guanosine
  modified_base 10: mod_base = OTHER; note = 2'O-methyl uridine
  modified_base 11: mod_base = OTHER; note = 2'O-methyl uridine
  modified_base 12: mod_base = OTHER; note = 2'O-methyl guanosine
  modified_base 13: mod_base = OTHER; note = 2'O-methyl uridine
  modified_base 14: mod_base = OTHER; note = 2'-fluoro uridine
  modified_base 15: mod_base = OTHER; note = 2'O-methyl uridine
  modified_base 16: mod_base = OTHER; note = 2'-fluoro uridine
  modified_base 17: mod_base = OTHER; note = 2'O-methyl guanosine
  modified_base 18: mod_base = OTHER; note = 2'O-methyl guanosine
  modified_base 19: mod_base = OTHER; note = 2'O-methyl cytidine phosphorothioate
  modified_base 20: mod_base = OTHER; note = 2'O-methyl uridine phosphorothioate
  modified_base 21: mod_base = OTHER; note = 2'O-methyl uridine
cggtgatggttgttttggctt

SEQ ID NO: 1960 - RNA, 21 nt, synthetic construct
  source 1..21: mol_type = other RNA
  modified_base 1: mod_base = OTHER; note = 5' vinyl phosphonate 2'O-methyl adenosine phosphorothioate
  modified_base 2: mod_base = OTHER; note = 2'-fluoro cytidine phosphorothioate
  modified_base 3: mod_base = OTHER; note = 2'O-methyl cytidine
  modified_base 4: mod_base = OTHER; note = 2'O-methyl guanosine
  modified_base 5: mod_base = OTHER; note = 2'O-methyl adenosine
  modified_base 6: mod_base = OTHER; note = 2'-fluoro adenosine
  modified_base 7: mod_base = OTHER; note = 2'O-methyl adenosine
  modified_base 8: mod_base = OTHER; note = 2'O-methyl guanosine
  modified_base 9: mod_base = OTHER; note = 2'O-methyl uridine
  modified_base 10: mod_base = OTHER; note = 2'O-methyl cytidine
  modified_base 11: mod_base = OTHER; note = 2'O-methyl adenosine
  modified_base 12: mod_base = OTHER; note = 2'O-methyl guanosine
  modified_base 13: mod_base = OTHER; note = 2'O-methyl adenosine
  modified_base 14: mod_base = OTHER; note = 2'-fluoro cytidine
  modified_base 15: mod_base = OTHER; note = 2'O-methyl adenosine
  modified_base 16: mod_base = OTHER; note = 2'-fluoro cytidine
  modified_base 17: mod_base = OTHER; note = 2'O-methyl cytidine
  modified_base 18: mod_base = OTHER; note = 2'O-methyl adenosine
  modified_base 19: mod_base = OTHER; note = 2'O-methyl guanosine phosphorothioate
  modified_base 20: mod_base = OTHER; note = 2'O-methyl uridine phosphorothioate
  modified_base 21: mod_base = OTHER; note = 2'O-methyl uridine
accgaaagtcagacaccagtt

SEQ ID NO: 1961 - RNA, 21 nt, synthetic construct
  source 1..21: mol_type = other RNA
  modified_base 1: mod_base = OTHER; note = 5' vinyl phosphonate 2'O-methyl adenosine phosphorothioate
  modified_base 2: mod_base = OTHER; note = 2'-fluoro adenosine phosphorothioate
  modified_base 3: mod_base = OTHER; note = 2'O-methyl adenosine
  modified_base 4: mod_base = OTHER; note = 2'O-methyl guanosine
  modified_base 5: mod_base = OTHER; note = 2'O-methyl uridine
  modified_base 6: mod_base = OTHER; note = 2'-fluoro cytidine
  modified_base 7: mod_base = OTHER; note = 2'O-methyl adenosine
  modified_base 8: mod_base = OTHER; note = 2'O-methyl guanosine
  modified_base 9: mod_base = OTHER; note = 2'O-methyl adenosine
  modified_base 10: mod_base = OTHER; note = 2'O-methyl cytidine
  modified_base 11: mod_base = OTHER; note = 2'O-methyl adenosine
  modified_base 12: mod_base = OTHER; note = 2'O-methyl cytidine
  modified_base 13: mod_base = OTHER; note = 2'O-methyl cytidine
  modified_base 14: mod_base = OTHER; note = 2'-fluoro adenosine
  modified_base 15: mod_base = OTHER; note = 2'O-methyl guanosine
  modified_base 16: mod_base = OTHER; note = 2'-fluoro adenosine
  modified_base 17: mod_base = OTHER; note = 2'O-methyl adenosine
  modified_base 18: mod_base = OTHER; note = 2'O-methyl cytidine
  modified_base 19: mod_base = OTHER; note = 2'O-methyl guanosine phosphorothioate
  modified_base 20: mod_base = OTHER; note = 2'O-methyl uridine phosphorothioate
  modified_base 21: mod_base = OTHER; note = 2'O-methyl uridine
aaagtcagacaccagaacgtt

SEQ ID NO: 1962 - RNA, 21 nt, synthetic construct
  source 1..21: mol_type = other RNA
  modified_base 1: mod_base = OTHER; note = 5' vinyl phosphonate 2'O-methyl uridine phosphorothioate
  modified_base 2: mod_base = OTHER; note = 2'-fluoro uridine phosphorothioate
  modified_base 3: mod_base = OTHER; note = 2'O-methyl guanosine
  modified_base 4: mod_base = OTHER; note = 2'O-methyl adenosine
  modified_base 5: mod_base = OTHER; note = 2'O-methyl cytidine
  modified_base 6: mod_base = OTHER; note = 2'-fluoro uridine
  modified_base 7: mod_base = OTHER; note = 2'O-methyl uridine
  modified_base 8: mod_base = OTHER; note = 2'O-methyl uridine
  modified_base 9: mod_base = OTHER; note = 2'O-methyl adenosine
  modified_base 10: mod_base = OTHER; note = 2'O-methyl guanosine
  modified_base 11: mod_base = OTHER; note = 2'O-methyl guanosine
  modified_base 12: mod_base = OTHER; note = 2'O-methyl guanosine
  modified_base 13: mod_base = OTHER; note = 2'O-methyl cytidine
  modified_base 14: mod_base = OTHER; note = 2'-fluoro adenosine
  modified_base 15: mod_base = OTHER; note = 2'O-methyl guanosine
  modified_base 16: mod_base = OTHER; note = 2'-fluoro adenosine
  modified_base 17: mod_base = OTHER; note = 2'O-methyl uridine
  modified_base 18: mod_base = OTHER; note = 2'O-methyl guanosine
  modified_base 19: mod_base = OTHER; note = 2'O-methyl uridine phosphorothioate
  modified_base 20: mod_base = OTHER; note = 2'O-methyl uridine phosphorothioate
  modified_base 21: mod_base = OTHER; note = 2'O-methyl uridine
ttgactttagggcagatgttt

SEQ ID NO: 1963 - RNA, 21 nt, synthetic construct
  source 1..21: mol_type = other RNA
  modified_base 1: mod_base = OTHER; note = 5' vinyl phosphonate 2'O-methyl adenosine phosphorothioate
  modified_base 2: mod_base = OTHER; note = 2'-fluoro guanosine phosphorothioate
  modified_base 3: mod_base = OTHER; note = 2'O-methyl adenosine
  modified_base 4: mod_base = OTHER; note = 2'O-methyl cytidine
  modified_base 5: mod_base = OTHER; note = 2'O-methyl adenosine
  modified_base 6: mod_base = OTHER; note = 2'-fluoro cytidine
  modified_base 7: mod_base = OTHER; note = 2'O-methyl cytidine
  modified_base 8: mod_base = OTHER; note = 2'O-methyl adenosine
  modified_base 9: mod_base = OTHER; note = 2'O-methyl guanosine
  modified_base 10: mod_base = OTHER; note = 2'O-methyl adenosine
  modified_base 11: mod_base = OTHER; note = 2'O-methyl adenosine
  modified_base 12: mod_base = OTHER; note = 2'O-methyl cytidine
  modified_base 13: mod_base = OTHER; note = 2'O-methyl guanosine
  modified_base 14: mod_base = OTHER; note = 2'-fluoro uridine
  modified_base 15: mod_base = OTHER; note = 2'O-methyl uridine
  modified_base 16: mod_base = OTHER; note = 2'-fluoro uridine
  modified_base 17: mod_base = OTHER; note = 2'O-methyl uridine
  modified_base 18: mod_base = OTHER; note = 2'O-methyl cytidine
  modified_base 19: mod_base = OTHER; note = 2'O-methyl cytidine phosphorothioate
  modified_base 20: mod_base = OTHER; note = 2'O-methyl uridine phosphorothioate
  modified_base 21: mod_base = OTHER; note = 2'O-methyl uridine
agacaccagaacgttttcctt

SEQ ID NO: 1964 - RNA, 21 nt, synthetic construct
  source 1..21: mol_type = other RNA
  modified_base 1: mod_base = OTHER; note = 5' vinyl phosphonate 2'O-methyl uridine phosphorothioate
  modified_base 2: mod_base = OTHER; note = 2'-fluoro uridine phosphorothioate
  modified_base 3: mod_base = OTHER; note = 2'O-methyl uridine
  modified_base 4: mod_base = OTHER; note = 2'O-methyl guanosine
  modified_base 5: mod_base = OTHER; note = 2'O-methyl guanosine
  modified_base 6: mod_base = OTHER; note = 2'-fluoro adenosine
  modified_base 7: mod_base = OTHER; note = 2'O-methyl cytidine
  modified_base 8: mod_base = OTHER; note = 2'O-methyl cytidine
  modified_base 9: mod_base = OTHER; note = 2'O-methyl guanosine
  modified_base 10: mod_base = OTHER; note = 2'O-methyl adenosine
  modified_base 11: mod_base = OTHER; note = 2'O-methyl adenosine
  modified_base 12: mod_base = OTHER; note = 2'O-methyl adenosine
  modified_base 13: mod_base = OTHER; note = 2'O-methyl guanosine
  modified_base 14: mod_base = OTHER; note = 2'-fluoro uridine
  modified_base 15: mod_base = OTHER; note = 2'O-methyl cytidine
  modified_base 16: mod_base = OTHER; note = 2'-fluoro adenosine
  modified_base 17: mod_base = OTHER; note = 2'O-methyl guanosine
  modified_base 18: mod_base = OTHER; note = 2'O-methyl adenosine
  modified_base 19: mod_base = OTHER; note = 2'O-methyl cytidine phosphorothioate
  modified_base 20: mod_base = OTHER; note = 2'O-methyl uridine phosphorothioate
  modified_base 21: mod_base = OTHER; note = 2'O-methyl uridine
tttggaccgaaagtcagactt

SEQ ID NO: 1965 - RNA, 21 nt, synthetic construct
  source 1..21: mol_type = other RNA
  modified_base 1: mod_base = OTHER; note = 5' vinyl phosphonate 2'O-methyl guanosine phosphorothioate
  modified_base 2: mod_base = OTHER; note = 2'-fluoro uridine phosphorothioate
  modified_base 3: mod_base = OTHER; note = 2'O-methyl cytidine
  modified_base 4: mod_base = OTHER; note = 2'O-methyl adenosine
  modified_base 5: mod_base = OTHER; note = 2'O-methyl guanosine
  modified_base 6: mod_base = OTHER; note = 2'-fluoro adenosine
  modified_base 7: mod_base = OTHER; note = 2'O-methyl cytidine
  modified_base 8: mod_base = OTHER; note = 2'O-methyl adenosine
  modified_base 9: mod_base = OTHER; note = 2'O-methyl cytidine
  modified_base 10: mod_base = OTHER; note = 2'O-methyl cytidine
  modified_base 11: mod_base = OTHER; note = 2'O-methyl adenosine
  modified_base 12: mod_base = OTHER; note = 2'O-methyl guanosine
  modified_base 13: mod_base = OTHER; note = 2'O-methyl adenosine
  modified_base 14: mod_base = OTHER; note = 2'-fluoro adenosine
  modified_base 15: mod_base = OTHER; note = 2'O-methyl cytidine
  modified_base 16: mod_base = OTHER; note = 2'-fluoro guanosine
  modified_base 17: mod_base = OTHER; note = 2'O-methyl uridine
  modified_base 18: mod_base = OTHER; note = 2'O-methyl uridine
  modified_base 19: mod_base = OTHER; note = 2'O-methyl uridine phosphorothioate
  modified_base 20: mod_base = OTHER; note = 2'O-methyl uridine phosphorothioate
  modified_base 21: mod_base = OTHER; note = 2'O-methyl uridine
gtcagacaccagaacgttttt

SEQ ID NO: 1966 - RNA, 21 nt, synthetic construct
  source 1..21: mol_type = other RNA
  modified_base 1: mod_base = OTHER; note = 5' vinyl phosphonate 2'O-methyl adenosine phosphorothioate
  modified_base 2: mod_base = OTHER; note = 2'-fluoro adenosine phosphorothioate
  modified_base 3: mod_base = OTHER; note = 2'O-methyl uridine
  modified_base 4: mod_base = OTHER; note = 2'O-methyl guanosine
  modified_base 5: mod_base = OTHER; note = 2'O-methyl guanosine
  modified_base 6: mod_base = OTHER; note = 2'-fluoro cytidine
  modified_base 7: mod_base = OTHER; note = 2'O-methyl adenosine
  modified_base 8: mod_base = OTHER; note = 2'O-methyl guanosine
  modified_base 9: mod_base = OTHER; note = 2'O-methyl adenosine
  modified_base 10: mod_base = OTHER; note = 2'O-methyl uridine
  modified_base 11: mod_base = OTHER; note = 2'O-methyl uridine
  modified_base 12: mod_base = OTHER; note = 2'O-methyl cytidine
  modified_base 13: mod_base = OTHER; note = 2'O-methyl cytidine
  modified_base 14: mod_base = OTHER; note = 2'-fluoro adenosine
  modified_base 15: mod_base = OTHER; note = 2'O-methyl cytidine
  modified_base 16: mod_base = OTHER; note = 2'-fluoro adenosine
  modified_base 17: mod_base = OTHER; note = 2'O-methyl guanosine
  modified_base 18: mod_base = OTHER; note = 2'O-methyl guanosine
  modified_base 19: mod_base = OTHER; note = 2'O-methyl cytidine phosphorothioate
  modified_base 20: mod_base = OTHER; note = 2'O-methyl uridine phosphorothioate
  modified_base 21: mod_base = OTHER; note = 2'O-methyl uridine
aatggcagattccacaggctt

SEQ ID NO: 1967 - RNA, 21 nt, synthetic construct
  source 1..21: mol_type = other RNA
  modified_base 1: mod_base = OTHER; note = 5' vinyl phosphonate 2'O-methyl adenosine phosphorothioate
  modified_base 2: mod_base = OTHER; note = 2'-fluoro adenosine phosphorothioate
  modified_base 3: mod_base = OTHER; note = 2'O-methyl guanosine
  modified_base 4: mod_base = OTHER; note = 2'O-methyl adenosine
  modified_base 5: mod_base = OTHER; note = 2'O-methyl cytidine
  modified_base 6: mod_base = OTHER; note = 2'-fluoro adenosine
  modified_base 7: mod_base = OTHER; note = 2'O-methyl uridine
  modified_base 8: mod_base = OTHER; note = 2'O-methyl uridine
  modified_base 9: mod_base = OTHER; note = 2'O-methyl adenosine
  modified_base 10: mod_base = OTHER; note = 2'O-methyl uridine
  modified_base 11: mod_base = OTHER; note = 2'O-methyl cytidine
  modified_base 12: mod_base = OTHER; note = 2'O-methyl cytidine
  modified_base 13: mod_base = OTHER; note = 2'O-methyl uridine
  modified_base 14: mod_base = OTHER; note = 2'-fluoro adenosine
  modified_base 15: mod_base = OTHER; note = 2'O-methyl adenosine
  modified_base 16: mod_base = OTHER; note = 2'-fluoro uridine
  modified_base 17: mod_base = OTHER; note = 2'O-methyl guanosine
  modified_base 18: mod_base = OTHER; note = 2'O-methyl guanosine
  modified_base 19: mod_base = OTHER; note = 2'O-methyl guanosine phosphorothioate
  modified_base 20: mod_base = OTHER; note = 2'O-methyl uridine phosphorothioate
  modified_base 21: mod_base = OTHER; note = 2'O-methyl uridine
aagacattatcctaatgggtt

SEQ ID NO: 1968 - RNA, 21 nt, synthetic construct
  source 1..21: mol_type = other RNA
  modified_base 1: mod_base = OTHER; note = 5' vinyl phosphonate 2'O-methyl adenosine phosphorothioate
  modified_base 2: mod_base = OTHER; note = 2'-fluoro adenosine phosphorothioate
  modified_base 3: mod_base = OTHER; note = 2'O-methyl cytidine
  modified_base 4: mod_base = OTHER; note = 2'O-methyl adenosine
  modified_base 5: mod_base = OTHER; note = 2'O-methyl uridine
  modified_base 6: mod_base = OTHER; note = 2'-fluoro adenosine
  modified_base 7: mod_base = OTHER; note = 2'O-methyl cytidine
  modified_base 8: mod_base = OTHER; note = 2'O-methyl cytidine
  modified_base 9: mod_base = OTHER; note = 2'O-methyl adenosine
  modified_base 10: mod_base = OTHER; note = 2'O-methyl adenosine
  modified_base 11: mod_base = OTHER; note = 2'O-methyl guanosine
  modified_base 12: mod_base = OTHER; note = 2'O-methyl guanosine
  modified_base 13: mod_base = OTHER; note = 2'O-methyl cytidine
  modified_base 14: mod_base = OTHER; note = 2'-fluoro adenosine
  modified_base 15: mod_base = OTHER; note = 2'O-methyl uridine
  modified_base 16: mod_base = OTHER; note = 2'-fluoro cytidine
  modified_base 17: mod_base = OTHER; note = 2'O-methyl cytidine
  modified_base 18: mod_base = OTHER; note = 2'O-methyl adenosine
  modified_base 19: mod_base = OTHER; note = 2'O-methyl cytidine phosphorothioate
  modified_base 20: mod_base = OTHER; note = 2'O-methyl uridine phosphorothioate
  modified_base 21: mod_base = OTHER; note = 2'O-methyl uridine
aacataccaaggcatccactt

SEQ ID NO: 1969 - RNA, 21 nt, synthetic construct
  source 1..21: mol_type = other RNA
  modified_base 1: mod_base = OTHER; note = 5' vinyl phosphonate 2'O-methyl adenosine phosphorothioate
  modified_base 2: mod_base = OTHER; note = 2'-fluoro uridine phosphorothioate
  modified_base 3: mod_base = OTHER; note = 2'O-methyl cytidine
  modified_base 4: mod_base = OTHER; note = 2'O-methyl cytidine
  modified_base 5: mod_base = OTHER; note = 2'O-methyl adenosine
  modified_base 6: mod_base = OTHER; note = 2'-fluoro cytidine
  modified_base 7: mod_base = OTHER; note = 2'O-methyl guanosine
  modified_base 8: mod_base = OTHER; note = 2'O-methyl adenosine
  modified_base 9: mod_base = OTHER; note = 2'O-methyl cytidine
  modified_base 10: mod_base = OTHER; note = 2'O-methyl uridine
  modified_base 11: mod_base = OTHER; note = 2'O-methyl uridine
  modified_base 12: mod_base = OTHER; note = 2'O-methyl cytidine
  modified_base 13: mod_base = OTHER; note = 2'O-methyl guanosine
  modified_base 14: mod_base = OTHER; note = 2'-fluoro uridine
  modified_base 15: mod_base = OTHER; note = 2'O-methyl cytidine
  modified_base 16: mod_base = OTHER; note = 2'-fluoro uridine
  modified_base 17: mod_base = OTHER; note = 2'O-methyl uridine
  modified_base 18: mod_base = OTHER; note = 2'O-methyl uridine
  modified_base 19: mod_base = OTHER; note = 2'O-methyl guanosine phosphorothioate
  modified_base 20: mod_base = OTHER; note = 2'O-methyl uridine phosphorothioate
  modified_base 21: mod_base = OTHER; note = 2'O-methyl uridine
atccacgacttcgtctttgtt

SEQ ID NO: 1970 - RNA, 21 nt, synthetic construct
  source 1..21: mol_type = other RNA
  modified_base 1: mod_base = OTHER; note = 5' vinyl phosphonate 2'O-methyl guanosine phosphorothioate
  modified_base 2: mod_base = OTHER; note = 2'-fluoro adenosine phosphorothioate
  modified_base 3: mod_base = OTHER; note = 2'O-methyl adenosine
  modified_base 4: mod_base = OTHER; note = 2'O-methyl cytidine
  modified_base 5: mod_base = OTHER; note = 2'O-methyl adenosine
  modified_base 6: mod_base = OTHER; note = 2'-fluoro uridine
  modified_base 7: mod_base = OTHER; note = 2'O-methyl adenosine
  modified_base 8: mod_base = OTHER; note = 2'O-methyl cytidine
  modified_base 9: mod_base = OTHER; note = 2'O-methyl cytidine
  modified_base 10: mod_base = OTHER; note = 2'O-methyl adenosine
  modified_base 11: mod_base = OTHER; note = 2'O-methyl adenosine
  modified_base 12: mod_base = OTHER; note = 2'O-methyl guanosine
  modified_base 13: mod_base = OTHER; note = 2'O-methyl guanosine
  modified_base 14: mod_base = OTHER; note = 2'-fluoro cytidine
  modified_base 15: mod_base = OTHER; note = 2'O-methyl adenosine
  modified_base 16: mod_base = OTHER; note = 2'-fluoro uridine
  modified_base 17: mod_base = OTHER; note = 2'O-methyl cytidine
  modified_base 18: mod_base = OTHER; note = 2'O-methyl cytidine
  modified_base 19: mod_base = OTHER; note = 2'O-methyl adenosine phosphorothioate
  modified_base 20: mod_base = OTHER; note = 2'O-methyl uridine phosphorothioate
  modified_base 21: mod_base = OTHER; note = 2'O-methyl uridine
gaacataccaaggcatccatt

SEQ ID NO: 1971 - RNA, 23 nt, synthetic construct
  source 1..23: mol_type = other RNA
  modified_base 1: mod_base = OTHER; note = 2'O-methyl adenosine phosphorothioate
  modified_base 2: mod_base = OTHER; note = 2'-fluoro cytidine phosphorothioate
  modified_base 3: mod_base = OTHER; note = 2'O-methyl adenosine
  modified_base 4: mod_base = OTHER; note = 2'-fluoro uridine
  modified_base 5: mod_base = OTHER; note = 2'O-methyl guanosine
  modified_base 6: mod_base = OTHER; note = 2'-fluoro cytidine
  modified_base 7: mod_base = OTHER; note = 2'O-methyl guanosine
  modified_base 8: mod_base = OTHER; note = 2'-fluoro cytidine
  modified_base 9: mod_base = OTHER; note = 2'O-methyl guanosine
  modified_base 10: mod_base = OTHER; note = 2'-fluoro cytidine
  modified_base 11: mod_base = OTHER; note = 2'O-methyl guanosine
  modified_base 12: mod_base = OTHER; note = 2'-fluoro uridine
  modified_base 13: mod_base = OTHER; note = 2'O-methyl cytidine
  modified_base 14: mod_base = OTHER; note = 2'-fluoro guanosine
  modified_base 15: mod_base = OTHER; note = 2'O-methyl cytidine
  modified_base 16: mod_base = OTHER; note = 2'-fluoro guanosine
  modified_base 17: mod_base = OTHER; note = 2'O-methyl guanosine
  modified_base 18: mod_base = OTHER; note = 2'-fluoro adenosine
  modified_base 19: mod_base = OTHER; note = 2'O-methyl guanosine
  modified_base 20: mod_base = OTHER; note = 2'-fluoro guanosine
  modified_base 21: mod_base = OTHER; note = 2'O-methyl adenosine phosphorothioate
  modified_base 22: mod_base = OTHER; note = 2'O-methyl uridine phosphorothioate
  modified_base 23: mod_base = OTHER; note = 2'O-methyl uridine
acatgcgcgcgtcgcggaggatt

SEQ ID NO: 1972 - RNA, 23 nt, synthetic construct
  source 1..23: mol_type = other RNA
  modified_base 1: mod_base = OTHER; note = 2'O-methyl adenosine phosphorothioate
  modified_base 2: mod_base = OTHER; note = 2'-fluoro adenosine phosphorothioate
  modified_base 3: mod_base = OTHER; note = 2'O-methyl cytidine
  modified_base 4: mod_base = OTHER; note = 2'-fluoro adenosine
  modified_base 5: mod_base = OTHER; note = 2'O-methyl uridine
  modified_base 6: mod_base = OTHER; note = 2'-fluoro guanosine
  modified_base 7: mod_base = OTHER; note = 2'O-methyl cytidine
  modified_base 8: mod_base = OTHER; note = 2'-fluoro guanosine
  modified_base 9: mod_base = OTHER; note = 2'O-methyl cytidine
  modified_base 10: mod_base = OTHER; note = 2'-fluoro guanosine
  modified_base 11: mod_base = OTHER; note = 2'O-methyl cytidine
  modified_base 12: mod_base = OTHER; note = 2'-fluoro guanosine
  modified_base 13: mod_base = OTHER; note = 2'O-methyl uridine
  modified_base 14: mod_base = OTHER; note = 2'-fluoro cytidine
  modified_base 15: mod_base = OTHER; note = 2'O-methyl guanosine
  modified_base 16: mod_base = OTHER; note = 2'-fluoro cytidine
  modified_base 17: mod_base = OTHER; note = 2'O-methyl guanosine
  modified_base 18: mod_base = OTHER; note = 2'-fluoro guanosine
  modified_base 19: mod_base = OTHER; note = 2'O-methyl adenosine
  modified_base 20: mod_base = OTHER; note = 2'-fluoro guanosine
  modified_base 21: mod_base = OTHER; note = 2'O-methyl guanosine phosphorothioate
  modified_base 22: mod_base = OTHER; note = 2'O-methyl uridine phosphorothioate
  modified_base 23: mod_base = OTHER; note = 2'O-methyl uridine
aacatgcgcgcgtcgcggaggtt

SEQ ID NO: 1973 - RNA, 23 nt, synthetic construct
  source 1..23: mol_type = other RNA
  modified_base 1: mod_base = OTHER; note = 2'O-methyl cytidine phosphorothioate
  modified_base 2: mod_base = OTHER; note = 2'-fluoro adenosine phosphorothioate
  modified_base 3: mod_base = OTHER; note = 2'O-methyl adenosine
  modified_base 4: mod_base = OTHER; note = 2'-fluoro cytidine
  modified_base 5: mod_base = OTHER; note = 2'O-methyl adenosine
  modified_base 6: mod_base = OTHER; note = 2'-fluoro uridine
  modified_base 7: mod_base = OTHER; note = 2'O-methyl guanosine
  modified_base 8: mod_base = OTHER; note = 2'-fluoro cytidine
  modified_base 9: mod_base = OTHER; note = 2'O-methyl guanosine
  modified_base 10: mod_base = OTHER; note = 2'-fluoro cytidine
  modified_base 11: mod_base = OTHER; note = 2'O-methyl guanosine
  modified_base 12: mod_base = OTHER; note = 2'-fluoro cytidine
  modified_base 13: mod_base = OTHER; note = 2'O-methyl guanosine
  modified_base 14: mod_base = OTHER; note = 2'-fluoro uridine
  modified_base 15: mod_base = OTHER; note = 2'O-methyl cytidine
  modified_base 16: mod_base = OTHER; note = 2'-fluoro guanosine
  modified_base 17: mod_base = OTHER; note = 2'O-methyl cytidine
  modified_base 18: mod_base = OTHER; note = 2'-fluoro guanosine
  modified_base 19: mod_base = OTHER; note = 2'O-methyl guanosine
  modified_base 20: mod_base = OTHER; note = 2'-fluoro adenosine
  modified_base 21: mod_base = OTHER; note = 2'O-methyl guanosine phosphorothioate
  modified_base 22: mod_base = OTHER; note = 2'O-methyl uridine phosphorothioate
  modified_base 23: mod_base = OTHER; note = 2'O-methyl uridine
caacatgcgcgcgtcgcggagtt

SEQ ID NO: 1974 - RNA, 23 nt, synthetic construct
  source 1..23: mol_type = other RNA
  modified_base 1: mod_base = OTHER; note = 2'O-methyl adenosine phosphorothioate
  modified_base 2: mod_base = OTHER; note = 2'-fluoro cytidine phosphorothioate
  modified_base 3: mod_base = OTHER; note = 2'O-methyl adenosine
  modified_base 4: mod_base = OTHER; note = 2'-fluoro adenosine
  modified_base 5: mod_base = OTHER; note = 2'O-methyl cytidine
  modified_base 6: mod_base = OTHER; note = 2'-fluoro adenosine
  modified_base 7: mod_base = OTHER; note = 2'O-methyl uridine
  modified_base 8: mod_base = OTHER; note = 2'-fluoro guanosine
  modified_base 9: mod_base = OTHER; note = 2'O-methyl cytidine
  modified_base 10: mod_base = OTHER; note = 2'-fluoro guanosine
  modified_base 11: mod_base = OTHER; note = 2'O-methyl cytidine
  modified_base 12: mod_base = OTHER; note = 2'-fluoro guanosine
  modified_base 13: mod_base = OTHER; note = 2'O-methyl cytidine
  modified_base 14: mod_base = OTHER; note = 2'-fluoro guanosine
  modified_base 15: mod_base = OTHER; note = 2'O-methyl uridine
  modified_base 16: mod_base = OTHER; note = 2'-fluoro cytidine
  modified_base 17: mod_base = OTHER; note = 2'O-methyl guanosine
  modified_base 18: mod_base = OTHER; note = 2'-fluoro cytidine
  modified_base 19: mod_base = OTHER; note = 2'O-methyl guanosine
  modified_base 20: mod_base = OTHER; note = 2'-fluoro guanosine
  modified_base 21: mod_base = OTHER; note = 2'O-methyl adenosine phosphorothioate
  modified_base 22: mod_base = OTHER; note = 2'O-methyl uridine phosphorothioate
  modified_base 23: mod_base = OTHER; note = 2'O-methyl uridine
acaacatgcgcgcgtcgcggatt

SEQ ID NO: 1975 - RNA, 23 nt, synthetic construct
  source 1..23: mol_type = other RNA
  modified_base 1: mod_base = OTHER; note = 2'O-methyl adenosine phosphorothioate
  modified_base 2: mod_base = OTHER; note = 2'-fluoro adenosine phosphorothioate
  modified_base 3: mod_base = OTHER; note = 2'O-methyl cytidine
  modified_base 4: mod_base = OTHER; note = 2'-fluoro adenosine
  modified_base 5: mod_base = OTHER; note = 2'O-methyl adenosine
  modified_base 6: mod_base = OTHER; note = 2'-fluoro cytidine
  modified_base 7: mod_base = OTHER; note = 2'O-methyl adenosine
  modified_base 8: mod_base = OTHER; note = 2'-fluoro uridine
  modified_base 9: mod_base = OTHER; note = 2'O-methyl guanosine
  modified_base 10: mod_base = OTHER; note = 2'-fluoro cytidine
  modified_base 11: mod_base = OTHER; note = 2'O-methyl guanosine
  modified_base 12: mod_base = OTHER; note = 2'-fluoro cytidine
  modified_base 13: mod_base = OTHER; note = 2'O-methyl guanosine
  modified_base 14: mod_base = OTHER; note = 2'-fluoro cytidine
  modified_base 15: mod_base = OTHER; note = 2'O-methyl guanosine
  modified_base 16: mod_base = OTHER; note = 2'-fluoro uridine
  modified_base 17: mod_base = OTHER; note = 2'O-methyl cytidine
  modified_base 18: mod_base = OTHER; note = 2'-fluoro guanosine
  modified_base 19: mod_base = OTHER; note = 2'O-methyl cytidine
  modified_base 20: mod_base = OTHER; note = 2'-fluoro guanosine
  modified_base 21: mod_base = OTHER; note = 2'O-methyl guanosine phosphorothioate
  modified_base 22: mod_base = OTHER; note = 2'O-methyl uridine phosphorothioate
  modified_base 23: mod_base = OTHER; note = 2'O-methyl uridine
aacaacatgcgcgcgtcgcggtt

SEQ ID NO: 1976 - RNA, 23 nt, synthetic construct
  source 1..23: mol_type = other RNA
  modified_base 1: mod_base = OTHER; note = 2'O-methyl cytidine phosphorothioate
  modified_base 2: mod_base = OTHER; note = 2'-fluoro guanosine phosphorothioate
  modified_base 3: mod_base = OTHER; note = 2'O-methyl adenosine
  modified_base 4: mod_base = OTHER; note = 2'-fluoro adenosine
  modified_base 5: mod_base = OTHER; note = 2'O-methyl cytidine
  modified_base 6: mod_base = OTHER; note = 2'-fluoro adenosine
  modified_base 7: mod_base = OTHER; note = 2'O-methyl adenosine
  modified_base 8: mod_base = OTHER; note = 2'-fluoro cytidine
  modified_base 9: mod_base = OTHER; note = 2'O-methyl adenosine
  modified_base 10: mod_base = OTHER; note = 2'-fluoro uridine
  modified_base 11: mod_base = OTHER; note = 2'O-methyl guanosine
  modified_base 12: mod_base = OTHER; note = 2'-fluoro cytidine
  modified_base 13: mod_base = OTHER; note = 2'O-methyl guanosine
  modified_base 14: mod_base = OTHER; note = 2'-fluoro cytidine
  modified_base 15: mod_base = OTHER; note = 2'O-methyl guanosine
  modified_base 16: mod_base = OTHER; note = 2'-fluoro cytidine
  modified_base 17: mod_base = OTHER; note = 2'O-methyl guanosine
  modified_base 18: mod_base = OTHER; note = 2'-fluoro uridine
  modified_base 19: mod_base = OTHER; note = 2'O-methyl cytidine
  modified_base 20: mod_base = OTHER; note = 2'-fluoro guanosine
  modified_base 21: mod_base = OTHER; note = 2'O-methyl cytidine phosphorothioate
  modified_base 22: mod_base = OTHER; note = 2'O-methyl uridine phosphorothioate
  modified_base 23: mod_base = OTHER; note = 2'O-methyl uridine
cgaacaacatgcgcgcgtcgctt

SEQ ID NO: 1977 - RNA, 23 nt, synthetic construct
  source 1..23: mol_type = other RNA
  modified_base 1: mod_base = OTHER; note = 2'O-methyl cytidine phosphorothioate
  modified_base 2: mod_base = OTHER; note = 2'-fluoro cytidine phosphorothioate
  modified_base 3: mod_base = OTHER; note = 2'O-methyl guanosine
  modified_base 4: mod_base = OTHER; note = 2'-fluoro adenosine
  modified_base 5: mod_base = OTHER; note = 2'O-methyl adenosine
  modified_base 6: mod_base = OTHER; note = 2'-fluoro cytidine
  modified_base 7: mod_base = OTHER; note = 2'O-methyl adenosine
  modified_base 8: mod_base = OTHER; note = 2'-fluoro adenosine
  modified_base 9: mod_base = OTHER; note = 2'O-methyl cytidine
  modified_base 10: mod_base = OTHER; note = 2'-fluoro adenosine
  modified_base 11: mod_base = OTHER; note = 2'O-methyl uridine
  modified_base 12: mod_base = OTHER; note = 2'-fluoro guanosine
  modified_base 13: mod_base = OTHER; note = 2'O-methyl cytidine
  modified_base 14: mod_base = OTHER; note = 2'-fluoro guanosine
  modified_base 15: mod_base = OTHER; note = 2'O-methyl cytidine
  modified_base 16: mod_base = OTHER; note = 2'-fluoro guanosine
  modified_base 17: mod_base = OTHER; note = 2'O-methyl cytidine
  modified_base 18: mod_base = OTHER; note = 2'-fluoro guanosine
  modified_base 19: mod_base = OTHER; note = 2'O-methyl uridine
  modified_base 20: mod_base = OTHER; note = 2'-fluoro cytidine
  modified_base 21: mod_base = OTHER; note = 2'O-methyl guanosine phosphorothioate
  modified_base 22: mod_base = OTHER; note = 2'O-methyl uridine phosphorothioate
  modified_base 23: mod_base = OTHER; note = 2'O-methyl uridine
ccgaacaacatgcgcgcgtcgtt

SEQ ID NO: 1978 - RNA, 23 nt, synthetic construct
  source 1..23: mol_type = other RNA
  modified_base 1: mod_base = OTHER; note = 2'O-methyl guanosine phosphorothioate
  modified_base 2: mod_base = OTHER; note = 2'-fluoro cytidine phosphorothioate
  modified_base 3: mod_base = OTHER; note = 2'O-methyl cytidine
  modified_base 4: mod_base = OTHER; note = 2'-fluoro guanosine
  modified_base 5: mod_base = OTHER; note = 2'O-methyl adenosine
  modified_base 6: mod_base = OTHER; note = 2'-fluoro adenosine
  modified_base 7: mod_base = OTHER; note = 2'O-methyl cytidine
  modified_base 8: mod_base = OTHER; note = 2'-fluoro adenosine
  modified_base 9: mod_base = OTHER; note = 2'O-methyl adenosine
  modified_base 10: mod_base = OTHER; note = 2'-fluoro cytidine
  modified_base 11: mod_base = OTHER; note = 2'O-methyl adenosine
  modified_base 12: mod_base = OTHER; note = 2'-fluoro uridine
  modified_base 13: mod_base = OTHER; note = 2'O-methyl guanosine
  modified_base 14: mod_base = OTHER; note = 2'-fluoro cytidine
  modified_base 15: mod_base = OTHER; note = 2'O-methyl guanosine
  modified_base 16: mod_base = OTHER; note = 2'-fluoro cytidine
  modified_base 17: mod_base = OTHER; note = 2'O-methyl guanosine
  modified_base 18: mod_base = OTHER; note = 2'-fluoro cytidine
  modified_base 19: mod_base = OTHER; note = 2'O-methyl guanosine
  modified_base 20: mod_base = OTHER; note = 2'-fluoro uridine
  modified_base 21: mod_base = OTHER; note = 2'O-methyl cytidine phosphorothioate
  modified_base 22: mod_base = OTHER; note = 2'O-methyl uridine phosphorothioate
  modified_base 23: mod_base = OTHER; note = 2'O-methyl uridine
gccgaacaacatgcgcgcgtctt

SEQ ID NO: 1979 - RNA, 23 nt, synthetic construct
  source 1..23: mol_type = other RNA
  modified_base 1: mod_base = OTHER; note = 2'O-methyl cytidine phosphorothioate
  modified_base 2: mod_base = OTHER; note = 2'-fluoro uridine phosphorothioate
  modified_base 3: mod_base = OTHER; note = 2'O-methyl cytidine
  modified_base 4: mod_base = OTHER; note = 2'-fluoro cytidine
  modified_base 5: mod_base = OTHER; note = 2'O-methyl uridine
  modified_base 6: mod_base = OTHER; note = 2'-fluoro guanosine
  modified_base 7: mod_base = OTHER; note = 2'O-methyl guanosine
  modified_base 8: mod_base = OTHER; note = 2'-fluoro cytidine
  modified_base 9: mod_base = OTHER; note = 2'O-methyl cytidine
  modified_base 10: mod_base = OTHER; note = 2'-fluoro uridine
  modified_base 11: mod_base = OTHER; note = 2'O-methyl uridine
  modified_base 12: mod_base = OTHER; note = 2'-fluoro cytidine
  modified_base 13: mod_base = OTHER; note = 2'O-methyl cytidine
  modified_base 14: mod_base = OTHER; note = 2'-fluoro guanosine
  modified_base 15: mod_base = OTHER; note = 2'O-methyl cytidine
  modified_base 16: mod_base = OTHER; note = 2'-fluoro adenosine
  modified_base 17: mod_base = OTHER; note = 2'O-methyl cytidine
  modified_base 18: mod_base = OTHER; note = 2'-fluoro adenosine
  modified_base 19: mod_base = OTHER; note = 2'O-methyl adenosine
  modified_base 20: mod_base = OTHER; note = 2'-fluoro guanosine
  modified_base 21: mod_base = OTHER; note = 2'O-methyl adenosine phosphorothioate
  modified_base 22: mod_base = OTHER; note = 2'O-methyl uridine phosphorothioate
  modified_base 23: mod_base = OTHER; note = 2'O-methyl uridine
ctcctggccttccgcacaagatt

SEQ ID NO: 1980 - RNA, 23 nt, synthetic construct
  source 1..23: mol_type = other RNA
  modified_base 1: mod_base = OTHER; note = 2'O-methyl adenosine phosphorothioate
  modified_base 2: mod_base = OTHER; note = 2'-fluoro cytidine phosphorothioate
  modified_base 3: mod_base = OTHER; note = 2'O-methyl uridine
  modified_base 4: mod_base = OTHER; note = 2'-fluoro cytidine
  modified_base 5: mod_base = OTHER; note = 2'O-methyl cytidine
  modified_base 6: mod_base = OTHER; note = 2'-fluoro uridine
  modified_base 7: mod_base = OTHER; note = 2'O-methyl guanosine
  modified_base 8: mod_base = OTHER; note = 2'-fluoro guanosine
  modified_base 9: mod_base = OTHER; note = 2'O-methyl cytidine
  modified_base 10: mod_base = OTHER; note = 2'-fluoro cytidine
  modified_base 11: mod_base = OTHER; note = 2'O-methyl uridine
  modified_base 12: mod_base = OTHER; note = 2'-fluoro uridine
  modified_base 13: mod_base = OTHER; note = 2'O-methyl cytidine
  modified_base 14: mod_base = OTHER; note = 2'-fluoro cytidine
  modified_base 15: mod_base = OTHER; note = 2'O-methyl guanosine
  modified_base 16: mod_base = OTHER; note = 2'-fluoro cytidine
  modified_base 17: mod_base = OTHER; note = 2'O-methyl adenosine
  modified_base 18: mod_base = OTHER; note = 2'-fluoro cytidine
  modified_base 19: mod_base = OTHER; note = 2'O-methyl adenosine
  modified_base 20: mod_base = OTHER; note = 2'-fluoro adenosine
  modified_base 21: mod_base = OTHER; note = 2'O-methyl guanosine phosphorothioate
  modified_base 22: mod_base = OTHER; note = 2'O-methyl uridine phosphorothioate
  modified_base 23: mod_base = OTHER; note = 2'O-methyl uridine
actcctggccttccgcacaagtt

SEQ ID NO: 1981 - RNA, 23 nt, synthetic construct
  source 1..23: mol_type = other RNA
  modified_base 1: mod_base = OTHER; note = 2'O-methyl cytidine phosphorothioate
  modified_base 2: mod_base = OTHER; note = 2'-fluoro guanosine phosphorothioate
  modified_base 3: mod_base = OTHER; note = 2'O-methyl adenosine
  modified_base 4: mod_base = OTHER; note = 2'-fluoro cytidine
  modified_base 5: mod_base = OTHER; note = 2'O-methyl uridine
  modified_base 6: mod_base = OTHER; note = 2'-fluoro cytidine
  modified_base 7: mod_base = OTHER; note = 2'O-methyl cytidine
  modified_base 8: mod_base = OTHER; note = 2'-fluoro uridine
  modified_base 9: mod_base = OTHER; note = 2'O-methyl guanosine
  modified_base 10: mod_base = OTHER; note = 2'-fluoro guanosine
  modified_base 11: mod_base = OTHER; note = 2'O-methyl cytidine
  modified_base 12: mod_base = OTHER; note = 2'-fluoro cytidine
  modified_base 13: mod_base = OTHER; note = 2'O-methyl uridine
  modified_base 14: mod_base = OTHER; note = 2'-fluoro uridine
  modified_base 15: mod_base = OTHER; note = 2'O-methyl cytidine
  modified_base 16: mod_base = OTHER; note = 2'-fluoro cytidine
  modified_base 17: mod_base = OTHER; note = 2'O-methyl guanosine
  modified_base 18: mod_base = OTHER; note = 2'-fluoro cytidine
  modified_base 19: mod_base = OTHER; note = 2'O-methyl adenosine
  modified_base 20: mod_base = OTHER; note = 2'-fluoro cytidine
  modified_base 21: mod_base = OTHER; note = 2'O-methyl adenosine phosphorothioate
  modified_base 22: mod_base = OTHER; note = 2'O-methyl uridine phosphorothioate
  modified_base 23: mod_base = OTHER; note = 2'O-methyl uridine
cgactcctggccttccgcacatt

SEQ ID NO: 1982 - RNA, 23 nt, synthetic construct
  source 1..23: mol_type = other RNA
  modified_base 1: mod_base = OTHER; note = 2'O-methyl uridine phosphorothioate
  modified_base 2: mod_base = OTHER; note = 2'-fluoro cytidine phosphorothioate
  modified_base 3: mod_base = OTHER; note = 2'O-methyl cytidine
  modified_base 4: mod_base = OTHER; note = 2'-fluoro guanosine
  modified_base 5: mod_base = OTHER; note = 2'O-methyl adenosine
  modified_base 6: mod_base = OTHER; note = 2'-fluoro cytidine
  modified_base 7: mod_base = OTHER; note = 2'O-methyl uridine
  modified_base 8: mod_base = OTHER; note = 2'-fluoro cytidine
  modified_base 9: mod_base = OTHER; note = 2'O-methyl cytidine
  modified_base 10: mod_base = OTHER; note = 2'-fluoro uridine
  modified_base 11: mod_base = OTHER; note = 2'O-methyl guanosine
  modified_base 12: mod_base = OTHER; note = 2'-fluoro guanosine
  modified_base 13: mod_base = OTHER; note = 2'O-methyl cytidine
  modified_base 14: mod_base = OTHER; note = 2'-fluoro cytidine
  modified_base 15: mod_base = OTHER; note = 2'O-methyl uridine
  modified_base 16: mod_base = OTHER; note = 2'-fluoro uridine
  modified_base 17: mod_base = OTHER; note = 2'O-methyl cytidine
  modified_base 18: mod_base = OTHER; note = 2'-fluoro cytidine
  modified_base 19: mod_base = OTHER; note = 2'O-methyl guanosine
  modified_base 20: mod_base = OTHER; note = 2'-fluoro cytidine
  modified_base 21: mod_base = OTHER; note = 2'O-methyl adenosine phosphorothioate
  modified_base 22: mod_base = OTHER; note = 2'O-methyl uridine phosphorothioate
  modified_base 23: mod_base = OTHER; note = 2'O-methyl uridine
tccgactcctggccttccgcatt

SEQ ID NO: 1983 - RNA, 23 nt, synthetic construct
  source 1..23: mol_type = other RNA
  modified_base 1: mod_base = OTHER; note = 2'O-methyl guanosine phosphorothioate
  modified_base 2: mod_base = OTHER; note = 2'-fluoro uridine phosphorothioate
  modified_base 3: mod_base = OTHER; note = 2'O-methyl uridine
  modified_base 4: mod_base = OTHER; note = 2'-fluoro cytidine
  modified_base 5: mod_base = OTHER; note = 2'O-methyl cytidine
  modified_base 6: mod_base = OTHER; note = 2'-fluoro guanosine
  modified_base 7: mod_base = OTHER; note = 2'O-methyl adenosine
  modified_base 8: mod_base = OTHER; note = 2'-fluoro cytidine
  modified_base 9: mod_base = OTHER; note = 2'O-methyl uridine
  modified_base 10: mod_base = OTHER; note = 2'-fluoro cytidine
  modified_base 11: mod_base = OTHER; note = 2'O-methyl cytidine
  modified_base 12: mod_base = OTHER; note = 2'-fluoro uridine
  modified_base 13: mod_base = OTHER; note = 2'O-methyl guanosine
  modified_base 14: mod_base = OTHER; note = 2'-fluoro guanosine
  modified_base 15: mod_base = OTHER; note = 2'O-methyl cytidine
  modified_base 16: mod_base = OTHER; note = 2'-fluoro cytidine
  modified_base 17: mod_base = OTHER; note = 2'O-methyl uridine
  modified_base 18: mod_base = OTHER; note = 2'-fluoro uridine
  modified_base 19: mod_base = OTHER; note = 2'O-methyl cytidine
  modified_base 20: mod_base = OTHER; note = 2'-fluoro cytidine
  modified_base 21: mod_base = OTHER; note = 2'O-methyl guanosine phosphorothioate
  modified_base 22: mod_base = OTHER; note = 2'O-methyl uridine phosphorothioate
  modified_base 23: mod_base = OTHER; note = 2'O-methyl uridine
gttccgactcctggccttccgtt

SEQ ID NO: 1984 - RNA, 23 nt, synthetic construct
  source 1..23: mol_type = other RNA
  modified_base 1: mod_base = OTHER; note = 2'O-methyl adenosine phosphorothioate
  modified_base 2: mod_base = OTHER; note = 2'-fluoro adenosine phosphorothioate
  modified_base 3: mod_base = OTHER; note = 2'O-methyl uridine
  modified_base 4: mod_base = OTHER; note = 2'-fluoro guanosine
  modified_base 5: mod_base = OTHER; note = 2'O-methyl uridine
  modified_base 6: mod_base = OTHER; note = 2'-fluoro uridine
  modified_base 7: mod_base = OTHER; note = 2'O-methyl cytidine
  modified_base 8: mod_base = OTHER; note = 2'-fluoro cytidine
  modified_base 9: mod_base = OTHER; note = 2'O-methyl guanosine
  modified_base 10: mod_base = OTHER; note = 2'-fluoro adenosine
  modified_base 11: mod_base = OTHER; note = 2'O-methyl cytidine
  modified_base 12: mod_base = OTHER; note = 2'-fluoro uridine
  modified_base 13: mod_base = OTHER; note = 2'O-methyl cytidine
  modified_base 14: mod_base = OTHER; note = 2'-fluoro cytidine
  modified_base 15: mod_base = OTHER; note = 2'O-methyl uridine
  modified_base 16: mod_base = OTHER; note = 2'-fluoro guanosine
  modified_base 17: mod_base = OTHER; note = 2'O-methyl guanosine
  modified_base 18: mod_base = OTHER; note = 2'-fluoro cytidine
  modified_base 19: mod_base = OTHER; note = 2'O-methyl cytidine
  modified_base 20: mod_base = OTHER; note = 2'-fluoro uridine
  modified_base 21: mod_base = OTHER; note = 2'O-methyl uridine phosphorothioate
  modified_base 22: mod_base = OTHER; note = 2'O-methyl uridine phosphorothioate
  modified_base 23: mod_base = OTHER; note = 2'O-methyl uridine
aatgttccgactcctggcctttt

SEQ ID NO: 1985 - RNA, 23 nt, synthetic construct
  source 1..23: mol_type = other RNA
  modified_base 1: mod_base = OTHER; note = 2'O-methyl cytidine phosphorothioate
  modified_base 2: mod_base = OTHER; note = 2'-fluoro adenosine phosphorothioate
  modified_base 3: mod_base = OTHER; note = 2'O-methyl adenosine
  modified_base 4: mod_base = OTHER; note = 2'-fluoro uridine
  modified_base 5: mod_base = OTHER; note = 2'O-methyl guanosine
  modified_base 6: mod_base = OTHER; note = 2'-fluoro uridine
  modified_base 7: mod_base = OTHER; note = 2'O-methyl uridine
  modified_base 8: mod_base = OTHER; note = 2'-fluoro cytidine
  modified_base 9: mod_base = OTHER; note = 2'O-methyl cytidine
  modified_base 10: mod_base = OTHER; note = 2'-fluoro guanosine
  modified_base 11: mod_base = OTHER; note = 2'O-methyl adenosine
  modified_base 12: mod_base = OTHER; note = 2'-fluoro cytidine
  modified_base 13: mod_base = OTHER; note = 2'O-methyl uridine
  modified_base 14: mod_base = OTHER; note = 2'-fluoro cytidine
  modified_base 15: mod_base = OTHER; note = 2'O-methyl cytidine
  modified_base 16: mod_base = OTHER; note = 2'-fluoro uridine
  modified_base 17: mod_base = OTHER; note = 2'O-methyl guanosine
  modified_base 18: mod_base = OTHER; note = 2'-fluoro guanosine
  modified_base 19: mod_base = OTHER; note = 2'O-methyl cytidine
  modified_base 20: mod_base = OTHER; note = 2'-fluoro cytidine
  modified_base 21: mod_base = OTHER; note = 2'O-methyl uridine phosphorothioate
  modified_base 22: mod_base = OTHER; note = 2'O-methyl uridine phosphorothioate
  modified_base 23: mod_base = OTHER; note = 2'O-methyl uridine
caatgttccgactcctggccttt

SEQ ID NO: 1986 - RNA, 23 nt, synthetic construct
  source 1..23: mol_type = other RNA
  modified_base 1: mod_base = OTHER; note = 2'O-methyl cytidine phosphorothioate
  modified_base 2: mod_base = OTHER; note = 2'-fluoro cytidine phosphorothioate
  modified_base 3: mod_base = OTHER; note = 2'O-methyl adenosine
  modified_base 4: mod_base = OTHER; note = 2'-fluoro adenosine
  modified_base 5: mod_base = OTHER; note = 2'O-methyl uridine
  modified_base 6: mod_base = OTHER; note = 2'-fluoro guanosine
  modified_base 7: mod_base = OTHER; note = 2'O-methyl uridine
  modified_base 8: mod_base = OTHER; note = 2'-fluoro uridine
  modified_base 9: mod_base = OTHER; note = 2'O-methyl cytidine
  modified_base 10: mod_base = OTHER; note = 2'-fluoro cytidine
  modified_base 11: mod_base = OTHER; note = 2'O-methyl guanosine
  modified_base 12: mod_base = OTHER; note = 2'-fluoro adenosine
  modified_base 13: mod_base = OTHER; note = 2'O-methyl cytidine
  modified_base 14: mod_base = OTHER; note = 2'-fluoro uridine
  modified_base 15: mod_base = OTHER; note = 2'O-methyl cytidine
  modified_base 16: mod_base = OTHER; note = 2'-fluoro cytidine
  modified_base 17: mod_base = OTHER; note = 2'O-methyl uridine
  modified_base 18: mod_base = OTHER; note = 2'-fluoro guanosine
  modified_base 19: mod_base = OTHER; note = 2'O-methyl guanosine
  modified_base 20: mod_base = OTHER; note = 2'-fluoro cytidine
  modified_base 21: mod_base = OTHER; note = 2'O-methyl cytidine phosphorothioate
  modified_base 22: mod_base = OTHER; note = 2'O-methyl uridine phosphorothioate
  modified_base 23: mod_base = OTHER; note = 2'O-methyl uridine
ccaatgttccgactcctggcctt

SEQ ID NO: 1987 - RNA, 23 nt, synthetic construct
  source 1..23: mol_type = other RNA
  modified_base 1: mod_base = OTHER; note = 2'O-methyl guanosine phosphorothioate
  modified_base 2: mod_base = OTHER; note = 2'-fluoro adenosine phosphorothioate
  modified_base 3: mod_base = OTHER; note = 2'O-methyl uridine
  modified_base 4: mod_base = OTHER; note = 2'-fluoro guanosine
  modified_base 5: mod_base = OTHER; note = 2'O-methyl cytidine
  modified_base 6: mod_base = OTHER; note = 2'-fluoro cytidine
  modified_base 7: mod_base = OTHER; note = 2'O-methyl adenosine
  modified_base 8: mod_base = OTHER; note = 2'-fluoro adenosine
  modified_base 9: mod_base = OTHER; note = 2'O-methyl uridine
  modified_base 10: mod_base = OTHER; note = 2'-fluoro guanosine
  modified_base 11: mod_base = OTHER; note = 2'O-methyl uridine
  modified_base 12: mod_base = OTHER; note = 2'-fluoro uridine
  modified_base 13: mod_base = OTHER; note = 2'O-methyl cytidine
  modified_base 14: mod_base = OTHER; note = 2'-fluoro cytidine
  modified_base 15: mod_base = OTHER; note = 2'O-methyl guanosine
  modified_base 16: mod_base = OTHER; note = 2'-fluoro adenosine
  modified_base 17: mod_base = OTHER; note = 2'O-methyl cytidine
  modified_base 18: mod_base = OTHER; note = 2'-fluoro uridine
  modified_base 19: mod_base = OTHER; note = 2'O-methyl cytidine
  modified_base 20: mod_base = OTHER; note = 2'-fluoro cytidine
  modified_base 21: mod_base = OTHER; note = 2'O-methyl uridine phosphorothioate
  modified_base 22: mod_base = OTHER; note = 2'O-methyl uridine phosphorothioate
  modified_base 23: mod_base = OTHER; note = 2'O-methyl uridine
gatgccaatgttccgactccttt

SEQ ID NO: 1988 - RNA, 23 nt, synthetic construct
  source 1..23: mol_type = other RNA
  modified_base 1: mod_base = OTHER; note = 2'O-methyl adenosine phosphorothioate
  modified_base 2: mod_base = OTHER; note = 2'-fluoro guanosine phosphorothioate
  modified_base 3: mod_base = OTHER; note = 2'O-methyl adenosine
  modified_base 4: mod_base = OTHER; note = 2'-fluoro uridine
  modified_base 5: mod_base = OTHER; note = 2'O-methyl guanosine
  modified_base 6: mod_base = OTHER; note = 2'-fluoro adenosine
  modified_base 7: mod_base = OTHER; note = 2'O-methyl guanosine
  modified_base 8: mod_base = OTHER; note = 2'-fluoro cytidine
  modified_base 9: mod_base = OTHER; note = 2'O-methyl uridine
  modified_base 10: mod_base = OTHER; note = 2'-fluoro guanosine
  modified_base 11: mod_base = OTHER; note = 2'O-methyl guanosine
  modified_base 12: mod_base = OTHER; note = 2'-fluoro uridine
  modified_base 13: mod_base = OTHER; note = 2'O-methyl guanosine
  modified_base 14: mod_base = OTHER; note = 2'-fluoro guanosine
  modified_base 15: mod_base = OTHER; note = 2'O-methyl adenosine
  modified_base 16: mod_base = OTHER; note = 2'-fluoro cytidine
  modified_base 17: mod_base = OTHER; note = 2'O-methyl adenosine
  modified_base 18: mod_base = OTHER; note = 2'-fluoro uridine
  modified_base 19: mod_base = OTHER; note = 2'O-methyl uridine
  modified_base 20: mod_base = OTHER; note = 2'-fluoro guanosine
  modified_base 21: mod_base = OTHER; note = 2'O-methyl guanosine phosphorothioate
  modified_base 22: mod_base = OTHER; note = 2'O-methyl uridine phosphorothioate
  modified_base 23: mod_base = OTHER; note = 2'O-methyl uridine
agatgagctggtggacattggtt

SEQ ID NO: 1989 - RNA, 23 nt, synthetic construct
  source 1..23: mol_type = other RNA
  modified_base 1: mod_base = OTHER; note = 2'O-methyl guanosine phosphorothioate
  modified_base 2: mod_base = OTHER; note = 2'-fluoro adenosine phosphorothioate
  modified_base 3: mod_base = OTHER; note = 2'O-methyl guanosine
  modified_base 4: mod_base = OTHER; note = 2'-fluoro adenosine
  modified_base 5: mod_base = OTHER; note = 2'O-methyl uridine
  modified_base 6: mod_base = OTHER; note = 2'-fluoro guanosine
  modified_base 7: mod_base = OTHER; note = 2'O-methyl adenosine
  modified_base 8: mod_base = OTHER; note = 2'-fluoro guanosine
  modified_base 9: mod_base = OTHER; note = 2'O-methyl cytidine
  modified_base 10: mod_base = OTHER; note = 2'-fluoro uridine
  modified_base 11: mod_base = OTHER; note = 2'O-methyl guanosine
  modified_base 12: mod_base = OTHER; note = 2'-fluoro guanosine
  modified_base 13: mod_base = OTHER; note = 2'O-methyl uridine
  modified_base 14: mod_base = OTHER; note = 2'-fluoro guanosine
  modified_base 15: mod_base = OTHER; note = 2'O-methyl guanosine
  modified_base 16: mod_base = OTHER; note = 2'-fluoro adenosine
  modified_base 17: mod_base = OTHER; note = 2'O-methyl cytidine
  modified_base 18: mod_base = OTHER; note = 2'-fluoro adenosine
  modified_base 19: mod_base = OTHER; note = 2'O-methyl uridine
  modified_base 20: mod_base = OTHER; note = 2'-fluoro uridine
  modified_base 21: mod_base = OTHER; note = 2'O-methyl guanosine phosphorothioate
  modified_base 22: mod_base = OTHER; note = 2'O-methyl uridine phosphorothioate
  modified_base 23: mod_base = OTHER; note = 2'O-methyl uridine
gagatgagctggtggacattgtt

SEQ ID NO: 1990 - RNA, 23 nt, synthetic construct
  source 1..23: mol_type = other RNA
  modified_base 1: mod_base = OTHER; note = 2'O-methyl cytidine phosphorothioate
  modified_base 2: mod_base = OTHER; note = 2'-fluoro guanosine phosphorothioate
  modified_base 3: mod_base = OTHER; note = 2'O-methyl guanosine
  modified_base 4: mod_base = OTHER; note = 2'-fluoro adenosine
  modified_base 5: mod_base = OTHER; note = 2'O-methyl guanosine
  modified_base 6: mod_base = OTHER; note = 2'-fluoro adenosine
  modified_base 7: mod_base = OTHER; note = 2'O-methyl uridine
  modified_base 8: mod_base = OTHER; note = 2'-fluoro guanosine
  modified_base 9: mod_base = OTHER; note = 2'O-methyl adenosine
  modified_base 10: mod_base = OTHER; note = 2'-fluoro guanosine
  modified_base 11: mod_base = OTHER; note = 2'O-methyl cytidine
  modified_base 12: mod_base = OTHER; note = 2'-fluoro uridine
  modified_base 13: mod_base = OTHER; note = 2'O-methyl guanosine
  modified_base 14: mod_base = OTHER; note = 2'-fluoro guanosine
  modified_base 15: mod_base = OTHER; note = 2'O-methyl uridine
  modified_base 16: mod_base = OTHER; note = 2'-fluoro guanosine
  modified_base 17: mod_base = OTHER; note = 2'O-methyl guanosine
  modified_base 18: mod_base = OTHER; note = 2'-fluoro adenosine
  modified_base 19: mod_base = OTHER; note = 2'O-methyl cytidine
  modified_base 20: mod_base = OTHER; note = 2'-fluoro adenosine
  modified_base 21: mod_base = OTHER; note = 2'O-methyl uridine phosphorothioate
  modified_base 22: mod_base = OTHER; note = 2'O-methyl uridine phosphorothioate
  modified_base 23: mod_base = OTHER; note = 2'O-methyl uridine
cggagatgagctggtggacattt

SEQ ID NO: 1991 - RNA, 23 nt, synthetic construct
  source 1..23: mol_type = other RNA
  modified_base 1: mod_base = OTHER; note = 2'O-methyl cytidine phosphorothioate
  modified_base 2: mod_base = OTHER; note = 2'-fluoro cytidine phosphorothioate
  modified_base 3: mod_base = OTHER; note = 2'O-methyl guanosine
  modified_base 4: mod_base = OTHER; note = 2'-fluoro guanosine
  modified_base 5: mod_base = OTHER; note = 2'O-methyl adenosine
  modified_base 6: mod_base = OTHER; note = 2'-fluoro guanosine
  modified_base 7: mod_base = OTHER; note = 2'O-methyl adenosine
  modified_base 8: mod_base = OTHER; note = 2'-fluoro uridine
  modified_base 9: mod_base = OTHER; note = 2'O-methyl guanosine
  modified_base 10: mod_base = OTHER; note = 2'-fluoro adenosine
  modified_base 11: mod_base = OTHER; note = 2'O-methyl guanosine
  modified_base 12: mod_base = OTHER; note = 2'-fluoro cytidine
  modified_base 13: mod_base = OTHER; note = 2'O-methyl uridine
  modified_base 14: mod_base = OTHER; note = 2'-fluoro guanosine
  modified_base 15: mod_base = OTHER; note = 2'O-methyl guanosine
  modified_base 16: mod_base = OTHER; note = 2'-fluoro uridine
  modified_base 17: mod_base = OTHER; note = 2'O-methyl guanosine
  modified_base 18: mod_base = OTHER; note = 2'-fluoro guanosine
  modified_base 19: mod_base = OTHER; note = 2'O-methyl adenosine
  modified_base 20: mod_base = OTHER; note = 2'-fluoro cytidine
  modified_base 21: mod_base = OTHER; note = 2'O-methyl adenosine phosphorothioate
  modified_base 22: mod_base = OTHER; note = 2'O-methyl uridine phosphorothioate
  modified_base 23: mod_base = OTHER; note = 2'O-methyl uridine
ccggagatgagctggtggacatt

SEQ ID NO: 1992 - RNA, 23 nt, synthetic construct
  source 1..23: mol_type = other RNA
  modified_base 1: mod_base = OTHER; note = 2'O-methyl guanosine phosphorothioate
  modified_base 2: mod_base = OTHER; note = 2'-fluoro cytidine phosphorothioate
  modified_base 3: mod_base = OTHER; note = 2'O-methyl cytidine
  modified_base 4: mod_base = OTHER; note = 2'-fluoro guanosine
  modified_base 5: mod_base = OTHER; note = 2'O-methyl guanosine
  modified_base 6: mod_base = OTHER; note = 2'-fluoro adenosine
  modified_base 7: mod_base = OTHER; note = 2'O-methyl guanosine
  modified_base 8: mod_base = OTHER; note = 2'-fluoro adenosine
  modified_base 9: mod_base = OTHER; note = 2'O-methyl uridine
  modified_base 10: mod_base = OTHER; note = 2'-fluoro guanosine
  modified_base 11: mod_base = OTHER; note = 2'O-methyl adenosine
  modified_base 12: mod_base = OTHER; note = 2'-fluoro guanosine
  modified_base 13: mod_base = OTHER; note = 2'O-methyl cytidine
  modified_base 14: mod_base = OTHER; note = 2'-fluoro uridine
  modified_base 15: mod_base = OTHER; note = 2'O-methyl guanosine
  modified_base 16: mod_base = OTHER; note = 2'-fluoro guanosine
  modified_base 17: mod_base = OTHER; note = 2'O-methyl uridine
  modified_base 18: mod_base = OTHER; note = 2'-fluoro guanosine
  modified_base 19: mod_base = OTHER; note = 2'O-methyl guanosine
  modified_base 20: mod_base = OTHER; note = 2'-fluoro adenosine
  modified_base 21: mod_base = OTHER; note = 2'O-methyl cytidine phosphorothioate
  modified_base 22: mod_base = OTHER; note = 2'O-methyl uridine phosphorothioate
  modified_base 23: mod_base = OTHER; note = 2'O-methyl uridine
gccggagatgagctggtggactt

SEQ ID NO: 1993 - RNA, 23 nt, synthetic construct
  source 1..23: mol_type = other RNA
  modified_base 1: mod_base = OTHER; note = 2'O-methyl uridine phosphorothioate
  modified_base 2: mod_base = OTHER; note = 2'-fluoro guanosine phosphorothioate
  modified_base 3: mod_base = OTHER; note = 2'O-methyl cytidine
  modified_base 4: mod_base = OTHER; note = 2'-fluoro cytidine
  modified_base 5: mod_base = OTHER; note = 2'O-methyl guanosine
  modified_base 6: mod_base = OTHER; note = 2'-fluoro guanosine
  modified_base 7: mod_base = OTHER; note = 2'O-methyl adenosine
  modified_base 8: mod_base = OTHER; note = 2'-fluoro guanosine
  modified_base 9: mod_base = OTHER; note = 2'O-methyl adenosine
  modified_base 10: mod_base = OTHER; note = 2'-fluoro uridine
  modified_base 11: mod_base = OTHER; note = 2'O-methyl guanosine
  modified_base 12: mod_base = OTHER; note = 2'-fluoro adenosine
  modified_base 13: mod_base = OTHER; note = 2'O-methyl guanosine
  modified_base 14: mod_base = OTHER; note = 2'-fluoro cytidine
  modified_base 15: mod_base = OTHER; note = 2'O-methyl uridine
  modified_base 16: mod_base = OTHER; note = 2'-fluoro guanosine
  modified_base 17: mod_base = OTHER; note = 2'O-methyl guanosine
  modified_base 18: mod_base = OTHER; note = 2'-fluoro uridine
  modified_base 19: mod_base = OTHER; note = 2'O-methyl guanosine
  modified_base 20: mod_base = OTHER; note = 2'-fluoro guanosine
  modified_base 21: mod_base = OTHER; note = 2'O-methyl adenosine phosphorothioate
  modified_base 22: mod_base = OTHER; note = 2'O-methyl uridine phosphorothioate
  modified_base 23: mod_base = OTHER; note = 2'O-methyl uridine
tgccggagatgagctggtggatt

SEQ ID NO: 1994 - RNA, 23 nt, synthetic construct
  source 1..23: mol_type = other RNA
  modified_base 1: mod_base = OTHER; note = 2'O-methyl uridine phosphorothioate
  modified_base 2: mod_base = OTHER; note = 2'-fluoro uridine phosphorothioate
  modified_base 3: mod_base = OTHER; note = 2'O-methyl uridine
  modified_base 4: mod_base = OTHER; note = 2'-fluoro guanosine
  modified_base 5: mod_base = OTHER; note = 2'O-methyl cytidine
  modified_base 6: mod_base = OTHER; note = 2'-fluoro cytidine
  modified_base 7: mod_base = OTHER; note = 2'O-methyl guanosine
  modified_base 8: mod_base = OTHER; note = 2'-fluoro guanosine
  modified_base 9: mod_base = OTHER; note = 2'O-methyl adenosine
  modified_base 10: mod_base = OTHER; note = 2'-fluoro guanosine
  modified_base 11: mod_base = OTHER; note = 2'O-methyl adenosine
  modified_base 12: mod_base = OTHER; note = 2'-fluoro uridine
  modified_base 13: mod_base = OTHER; note = 2'O-methyl guanosine
  modified_base 14: mod_base = OTHER; note = 2'-fluoro adenosine
  modified_base 15: mod_base = OTHER; note = 2'O-methyl guanosine
  modified_base 16: mod_base = OTHER; note = 2'-fluoro cytidine
  modified_base 17: mod_base = OTHER; note = 2'O-methyl uridine
  modified_base 18: mod_base = OTHER; note = 2'-fluoro guanosine
  modified_base 19: mod_base = OTHER; note = 2'O-methyl guanosine
  modified_base 20: mod_base = OTHER; note = 2'-fluoro uridine
  modified_base 21: mod_base = OTHER; note = 2'O-methyl guanosine phosphorothioate
  modified_base 22: mod_base = OTHER; note = 2'O-methyl uridine phosphorothioate
  modified_base 23: mod_base = OTHER; note = 2'O-methyl uridine
tttgccggagatgagctggtgtt

SEQ ID NO: 1995 - RNA, 23 nt, synthetic construct
  source 1..23: mol_type = other RNA
  modified_base 1: mod_base = OTHER; note = 2'O-methyl cytidine phosphorothioate
  modified_base 2: mod_base = OTHER; note = 2'-fluoro cytidine phosphorothioate
  modified_base 3: mod_base = OTHER; note = 2'O-methyl adenosine
  modified_base 4: mod_base = OTHER; note = 2'-fluoro uridine
  modified_base 5: mod_base = OTHER; note = 2'O-methyl cytidine
  modified_base 6: mod_base = OTHER; note = 2'-fluoro adenosine
  modified_base 7: mod_base = OTHER; note = 2'O-methyl guanosine
  modified_base 8: mod_base = OTHER; note = 2'-fluoro adenosine
  modified_base 9: mod_base = OTHER; note = 2'O-methyl cytidine
  modified_base 10: mod_base = OTHER; note = 2'-fluoro adenosine
  modified_base 11: mod_base = OTHER; note = 2'O-methyl cytidine
  modified_base 12: mod_base = OTHER; note = 2'-fluoro uridine
  modified_base 13: mod_base = OTHER; note = 2'O-methyl cytidine
  modified_base 14: mod_base = OTHER; note = 2'-fluoro uridine
  modified_base 15: mod_base = OTHER; note = 2'O-methyl guanosine
  modified_base 16: mod_base = OTHER; note = 2'-fluoro guanosine
  modified_base 17: mod_base = OTHER; note = 2'O-methyl uridine
  modified_base 18: mod_base = OTHER; note = 2'-fluoro adenosine
  modified_base 19: mod_base = OTHER; note = 2'O-methyl adenosine
  modified_base 20: mod_base = OTHER; note = 2'-fluoro guanosine
  modified_base 21: mod_base = OTHER; note = 2'O-methyl adenosine phosphorothioate
  modified_base 22: mod_base = OTHER; note = 2'O-methyl uridine phosphorothioate
  modified_base 23: mod_base = OTHER; note = 2'O-methyl uridine
ccatcagacactctggtaagatt

SEQ ID NO: 1996 - RNA, 23 nt, synthetic construct
  source 1..23: mol_type = other RNA
  modified_base 1: mod_base = OTHER; note = 2'O-methyl cytidine phosphorothioate
  modified_base 2: mod_base = OTHER; note = 2'-fluoro cytidine phosphorothioate
  modified_base 3: mod_base = OTHER; note = 2'O-methyl cytidine
  modified_base 4: mod_base = OTHER; note = 2'-fluoro adenosine
  modified_base 5: mod_base = OTHER; note = 2'O-methyl uridine
  modified_base 6: mod_base = OTHER; note = 2'-fluoro cytidine
  modified_base 7: mod_base = OTHER; note = 2'O-methyl adenosine
  modified_base 8: mod_base = OTHER; note = 2'-fluoro guanosine
  modified_base 9: mod_base = OTHER; note = 2'O-methyl adenosine
  modified_base 10: mod_base = OTHER; note = 2'-fluoro cytidine
  modified_base 11: mod_base = OTHER; note = 2'O-methyl adenosine
  modified_base 12: mod_base = OTHER; note = 2'-fluoro cytidine
  modified_base 13: mod_base = OTHER; note = 2'O-methyl uridine
  modified_base 14: mod_base = OTHER; note = 2'-fluoro cytidine
  modified_base 15: mod_base = OTHER; note = 2'O-methyl uridine
  modified_base 16: mod_base = OTHER; note = 2'-fluoro guanosine
  modified_base 17: mod_base = OTHER; note = 2'O-methyl guanosine
  modified_base 18: mod_base = OTHER; note = 2'-fluoro uridine
  modified_base 19: mod_base = OTHER; note = 2'O-methyl adenosine
  modified_base 20: mod_base = OTHER; note = 2'-fluoro adenosine
  modified_base 21: mod_base = OTHER; note = 2'O-methyl guanosine phosphorothioate
  modified_base 22: mod_base = OTHER; note = 2'O-methyl uridine phosphorothioate
  modified_base 23: mod_base = OTHER; note = 2'O-methyl uridine
cccatcagacactctggtaagtt

SEQ ID NO: 1997 - RNA, 23 nt, synthetic construct
  source 1..23: mol_type = other RNA
  modified_base 1: mod_base = OTHER; note = 2'O-methyl cytidine phosphorothioate
  modified_base 2: mod_base = OTHER; note = 2'-fluoro cytidine phosphorothioate
  modified_base 3: mod_base = OTHER; note = 2'O-methyl cytidine
  modified_base 4: mod_base = OTHER; note = 2'-fluoro cytidine
  modified_base 5: mod_base = OTHER; note = 2'O-methyl adenosine
  modified_base 6: mod_base = OTHER; note = 2'-fluoro uridine
  modified_base 7: mod_base = OTHER; note = 2'O-methyl cytidine
  modified_base 8: mod_base = OTHER; note = 2'-fluoro adenosine
  modified_base 9: mod_base = OTHER; note = 2'O-methyl guanosine
  modified_base 10: mod_base = OTHER; note = 2'-fluoro adenosine
  modified_base 11: mod_base = OTHER; note = 2'O-methyl cytidine
  modified_base 12: mod_base = OTHER; note = 2'-fluoro adenosine
  modified_base 13: mod_base = OTHER; note = 2'O-methyl cytidine
  modified_base 14: mod_base = OTHER; note = 2'-fluoro uridine
  modified_base 15: mod_base = OTHER; note = 2'O-methyl cytidine
  modified_base 16: mod_base = OTHER; note = 2'-fluoro uridine
  modified_base 17: mod_base = OTHER; note = 2'O-methyl guanosine
  modified_base 18: mod_base = OTHER; note = 2'-fluoro guanosine
  modified_base 19: mod_base = OTHER; note = 2'O-methyl uridine
  modified_base 20: mod_base = OTHER; note = 2'-fluoro adenosine
  modified_base 21: mod_base = OTHER; note = 2'O-methyl adenosine phosphorothioate
  modified_base 22: mod_base = OTHER; note = 2'O-methyl uridine phosphorothioate
  modified_base 23: mod_base = OTHER; note = 2'O-methyl uridine
ccccatcagacactctggtaatt

SEQ ID NO: 1998 - RNA, 23 nt, synthetic construct
  source 1..23: mol_type = other RNA
  modified_base 1: mod_base = OTHER; note = 2'O-methyl uridine phosphorothioate
  modified_base 2: mod_base = OTHER; note = 2'-fluoro cytidine phosphorothioate
  modified_base 3: mod_base = OTHER; note = 2'O-methyl cytidine
  modified_base 4: mod_base = OTHER; note = 2'-fluoro cytidine
  modified_base 5: mod_base = OTHER; note = 2'O-methyl cytidine
  modified_base 6: mod_base = OTHER; note = 2'-fluoro adenosine
  modified_base 7: mod_base = OTHER; note = 2'O-methyl uridine
  modified_base 8: mod_base = OTHER; note = 2'-fluoro cytidine
  modified_base 9: mod_base = OTHER; note = 2'O-methyl adenosine
  modified_base 10: mod_base = OTHER; note = 2'-fluoro guanosine
  modified_base 11: mod_base = OTHER; note = 2'O-methyl adenosine
  modified_base 12: mod_base = OTHER; note = 2'-fluoro cytidine
  modified_base 13: mod_base = OTHER; note = 2'O-methyl adenosine
  modified_base 14: mod_base = OTHER; note = 2'-fluoro cytidine
  modified_base 15: mod_base = OTHER; note = 2'O-methyl uridine
  modified_base 16: mod_base = OTHER; note = 2'-fluoro cytidine
  modified_base 17: mod_base = OTHER; note = 2'O-methyl uridine
  modified_base 18: mod_base = OTHER; note = 2'-fluoro guanosine
  modified_base 19: mod_base = OTHER; note = 2'O-methyl guanosine
  modified_base 20: mod_base = OTHER; note = 2'-fluoro uridine
  modified_base 21: mod_base = OTHER; note = 2'O-methyl adenosine phosphorothioate
  modified_base 22: mod_base = OTHER; note = 2'O-methyl uridine phosphorothioate
  modified_base 23: mod_base = OTHER; note = 2'O-methyl uridine
tccccatcagacactctggtatt

SEQ ID NO: 1999 - RNA, 23 nt, synthetic construct
  source 1..23: mol_type = other RNA
  modified_base 1: mod_base = OTHER; note = 2'O-methyl uridine phosphorothioate
  modified_base 2: mod_base = OTHER; note = 2'-fluoro uridine phosphorothioate
  modified_base 3: mod_base = OTHER; note = 2'O-methyl uridine
  modified_base 4: mod_base = OTHER; note = 2'-fluoro uridine
  modified_base 5: mod_base = OTHER; note = 2'O-methyl cytidine
  modified_base 6: mod_base = OTHER; note = 2'-fluoro cytidine
  modified_base 7: mod_base = OTHER; note = 2'O-methyl cytidine
  modified_base 8: mod_base = OTHER; note = 2'-fluoro cytidine
  modified_base 9: mod_base = OTHER; note = 2'O-methyl adenosine
  modified_base 10: mod_base = OTHER; note = 2'-fluoro uridine
  modified_base 11: mod_base = OTHER; note = 2'O-methyl cytidine
  modified_base 12: mod_base = OTHER; note = 2'-fluoro adenosine
  modified_base 13: mod_base = OTHER; note = 2'O-methyl guanosine
  modified_base 14: mod_base = OTHER; note = 2'-fluoro adenosine
  modified_base 15: mod_base = OTHER; note = 2'O-methyl cytidine
  modified_base 16: mod_base = OTHER; note = 2'-fluoro adenosine
  modified_base 17: mod_base = OTHER; note = 2'O-methyl cytidine
  modified_base 18: mod_base = OTHER; note = 2'-fluoro uridine
  modified_base 19: mod_base = OTHER; note = 2'O-methyl cytidine
  modified_base 20: mod_base = OTHER; note = 2'-fluoro uridine
  modified_base 21: mod_base = OTHER; note = 2'O-methyl guanosine phosphorothioate
  modified_base 22: mod_base = OTHER; note = 2'O-methyl uridine phosphorothioate
  modified_base 23: mod_base = OTHER; note = 2'O-methyl uridine
ttttccccatcagacactctgtt

SEQ ID NO: 2000 - RNA, 23 nt, synthetic construct
  source 1..23: mol_type = other RNA
  modified_base 1: mod_base = OTHER; note = 2'O-methyl guanosine phosphorothioate
  modified_base 2: mod_base = OTHER; note = 2'-fluoro uridine phosphorothioate
  modified_base 3: mod_base = OTHER; note = 2'O-methyl uridine
  modified_base 4: mod_base = OTHER; note = 2'-fluoro uridine
  modified_base 5: mod_base = OTHER; note = 2'O-methyl uridine
  modified_base 6: mod_base = OTHER; note = 2'-fluoro cytidine
  modified_base 7: mod_base = OTHER; note = 2'O-methyl cytidine
  modified_base 8: mod_base = OTHER; note = 2'-fluoro cytidine
  modified_base 9: mod_base = OTHER; note = 2'O-methyl cytidine
  modified_base 10: mod_base = OTHER; note = 2'-fluoro adenosine
  modified_base 11: mod_base = OTHER; note = 2'O-methyl uridine
  modified_base 12: mod_base = OTHER; note = 2'-fluoro cytidine
  modified_base 13: mod_base = OTHER; note = 2'O-methyl adenosine
  modified_base 14: mod_base = OTHER; note = 2'-fluoro guanosine
  modified_base 15: mod_base = OTHER; note = 2'O-methyl adenosine
  modified_base 16: mod_base = OTHER; note = 2'-fluoro cytidine
  modified_base 17: mod_base = OTHER; note = 2'O-methyl adenosine
  modified_base 18: mod_base = OTHER; note = 2'-fluoro cytidine
  modified_base 19: mod_base = OTHER; note = 2'O-methyl uridine
  modified_base 20: mod_base = OTHER; note = 2'-fluoro cytidine
  modified_base 21: mod_base = OTHER; note = 2'O-methyl uridine phosphorothioate
  modified_base 22: mod_base = OTHER; note = 2'O-methyl uridine phosphorothioate
  modified_base 23: mod_base = OTHER; note = 2'O-methyl uridine
gttttccccatcagacactcttt

SEQ ID NO: 2001 - RNA, 23 nt, synthetic construct
  source 1..23: mol_type = other RNA
  modified_base 1: mod_base = OTHER; note = 2'O-methyl cytidine phosphorothioate
  modified_base 2: mod_base = OTHER; note = 2'-fluoro guanosine phosphorothioate
  modified_base 3: mod_base = OTHER; note = 2'O-methyl uridine
  modified_base 4: mod_base = OTHER; note = 2'-fluoro uridine
  modified_base 5: mod_base = OTHER; note = 2'O-methyl uridine
  modified_base 6: mod_base = OTHER; note = 2'-fluoro uridine
  modified_base 7: mod_base = OTHER; note = 2'O-methyl cytidine
  modified_base 8: mod_base = OTHER; note = 2'-fluoro cytidine
  modified_base 9: mod_base = OTHER; note = 2'O-methyl cytidine
  modified_base 10: mod_base = OTHER; note = 2'-fluoro cytidine
  modified_base 11: mod_base = OTHER; note = 2'O-methyl adenosine
  modified_base 12: mod_base = OTHER; note = 2'-fluoro uridine
  modified_base 13: mod_base = OTHER; note = 2'O-methyl cytidine
  modified_base 14: mod_base = OTHER; note = 2'-fluoro adenosine
  modified_base 15: mod_base = OTHER; note = 2'O-methyl guanosine
  modified_base 16: mod_base = OTHER; note = 2'-fluoro adenosine
  modified_base 17: mod_base = OTHER; note = 2'O-methyl cytidine
  modified_base 18: mod_base = OTHER; note = 2'-fluoro adenosine
  modified_base 19: mod_base = OTHER; note = 2'O-methyl cytidine
  modified_base 20: mod_base = OTHER; note = 2'-fluoro uridine
  modified_base 21: mod_base = OTHER; note = 2'O-methyl cytidine phosphorothioate
  modified_base 22: mod_base = OTHER; note = 2'O-methyl uridine phosphorothioate
  modified_base 23: mod_base = OTHER; note = 2'O-methyl uridine
cgttttccccatcagacactctt

SEQ ID NO: 2002 - RNA, 23 nt, synthetic construct
  source 1..23: mol_type = other RNA
  modified_base 1: mod_base = OTHER; note = 2'O-methyl adenosine phosphorothioate
  modified_base 2: mod_base = OTHER; note = 2'-fluoro cytidine phosphorothioate
  modified_base 3: mod_base = OTHER; note = 2'O-methyl guanosine
  modified_base 4: mod_base = OTHER; note = 2'-fluoro uridine
  modified_base 5: mod_base = OTHER; note = 2'O-methyl uridine
  modified_base 6: mod_base = OTHER; note = 2'-fluoro uridine
  modified_base 7: mod_base = OTHER; note = 2'O-methyl uridine
  modified_base 8: mod_base = OTHER; note = 2'-fluoro cytidine
  modified_base 9: mod_base = OTHER; note = 2'O-methyl cytidine
  modified_base 10: mod_base = OTHER; note = 2'-fluoro cytidine
  modified_base 11: mod_base = OTHER; note = 2'O-methyl cytidine
  modified_base 12: mod_base = OTHER; note = 2'-fluoro adenosine
  modified_base 13: mod_base = OTHER; note = 2'O-methyl uridine
  modified_base 14: mod_base = OTHER; note = 2'-fluoro cytidine
  modified_base 15: mod_base = OTHER; note = 2'O-methyl adenosine
  modified_base 16: mod_base = OTHER; note = 2'-fluoro guanosine
  modified_base 17: mod_base = OTHER; note = 2'O-methyl adenosine
  modified_base 18: mod_base = OTHER; note = 2'-fluoro cytidine
  modified_base 19: mod_base = OTHER; note = 2'O-methyl adenosine
  modified_base 20: mod_base = OTHER; note = 2'-fluoro cytidine
  modified_base 21: mod_base = OTHER; note = 2'O-methyl uridine phosphorothioate
  modified_base 22: mod_base = OTHER; note = 2'O-methyl uridine phosphorothioate
  modified_base 23: mod_base = OTHER; note = 2'O-methyl uridine
acgttttccccatcagacacttt

SEQ ID NO: 2003 - RNA, 23 nt, synthetic construct
  source 1..23: mol_type = other RNA
  modified_base 1: mod_base = OTHER; note = 2'O-methyl adenosine phosphorothioate
  modified_base 2: mod_base = OTHER; note = 2'-fluoro adenosine phosphorothioate
  modified_base 3: mod_base = OTHER; note = 2'O-methyl cytidine
  modified_base 4: mod_base = OTHER; note = 2'-fluoro guanosine
  modified_base 5: mod_base = OTHER; note = 2'O-methyl uridine
  modified_base 6: mod_base = OTHER; note = 2'-fluoro uridine
  modified_base 7: mod_base = OTHER; note = 2'O-methyl uridine
  modified_base 8: mod_base = OTHER; note = 2'-fluoro uridine
  modified_base 9: mod_base = OTHER; note = 2'O-methyl cytidine
  modified_base 10: mod_base = OTHER; note = 2'-fluoro cytidine
  modified_base 11: mod_base = OTHER; note = 2'O-methyl cytidine
  modified_base 12: mod_base = OTHER; note = 2'-fluoro cytidine
  modified_base 13: mod_base = OTHER; note = 2'O-methyl adenosine
  modified_base 14: mod_base = OTHER; note = 2'-fluoro uridine
  modified_base 15: mod_base = OTHER; note = 2'O-methyl cytidine
  modified_base 16: mod_base = OTHER; note = 2'-fluoro adenosine
  modified_base 17: mod_base = OTHER; note = 2'O-methyl guanosine
  modified_base 18: mod_base = OTHER; note = 2'-fluoro adenosine
  modified_base 19: mod_base = OTHER; note = 2'O-methyl cytidine
  modified_base 20: mod_base = OTHER; note = 2'-fluoro adenosine
  modified_base 21: mod_base = OTHER; note = 2'O-methyl cytidine phosphorothioate
  modified_base 22: mod_base = OTHER; note = 2'O-methyl uridine phosphorothioate
  modified_base 23: mod_base = OTHER; note = 2'O-methyl uridine
aacgttttccccatcagacactt

SEQ ID NO: 2004 - RNA, 23 nt, synthetic construct
  source 1..23: mol_type = other RNA
  modified_base 1: mod_base = OTHER; note = 2'O-methyl guanosine phosphorothioate
  modified_base 2: mod_base = OTHER; note = 2'-fluoro adenosine phosphorothioate
  modified_base 3: mod_base = OTHER; note = 2'O-methyl adenosine
  modified_base 4: mod_base = OTHER; note = 2'-fluoro cytidine
  modified_base 5: mod_base = OTHER; note = 2'O-methyl guanosine
  modified_base 6: mod_base = OTHER; note = 2'-fluoro uridine
  modified_base 7: mod_base = OTHER; note = 2'O-methyl uridine
  modified_base 8: mod_base = OTHER; note = 2'-fluoro uridine
  modified_base 9: mod_base = OTHER; note = 2'O-methyl uridine
  modified_base 10: mod_base = OTHER; note = 2'-fluoro cytidine
  modified_base 11: mod_base = OTHER; note = 2'O-methyl cytidine
  modified_base 12: mod_base = OTHER; note = 2'-fluoro cytidine
  modified_base 13: mod_base = OTHER; note = 2'O-methyl cytidine
  modified_base 14: mod_base = OTHER; note = 2'-fluoro adenosine
  modified_base 15: mod_base = OTHER; note = 2'O-methyl uridine
  modified_base 16: mod_base = OTHER; note = 2'-fluoro cytidine
  modified_base 17: mod_base = OTHER; note = 2'O-methyl adenosine
  modified_base 18: mod_base = OTHER; note = 2'-fluoro guanosine
  modified_base 19: mod_base = OTHER; note = 2'O-methyl adenosine
  modified_base 20: mod_base = OTHER; note = 2'-fluoro cytidine
  modified_base 21: mod_base = OTHER; note = 2'O-methyl adenosine phosphorothioate
  modified_base 22: mod_base = OTHER; note = 2'O-methyl uridine phosphorothioate
  modified_base 23: mod_base = OTHER; note = 2'O-methyl uridine
gaacgttttccccatcagacatt

SEQ ID NO: 2005 - RNA, 23 nt, synthetic construct
  source 1..23: mol_type = other RNA
  modified_base 1: mod_base = OTHER; note = 2'O-methyl adenosine phosphorothioate
  modified_base 2: mod_base = OTHER; note = 2'-fluoro guanosine phosphorothioate
  modified_base 3: mod_base = OTHER; note = 2'O-methyl adenosine
  modified_base 4: mod_base = OTHER; note = 2'-fluoro adenosine
  modified_base 5: mod_base = OTHER; note = 2'O-methyl cytidine
  modified_base 6: mod_base = OTHER; note = 2'-fluoro guanosine
  modified_base 7: mod_base = OTHER; note = 2'O-methyl uridine
  modified_base 8: mod_base = OTHER; note = 2'-fluoro uridine
  modified_base 9: mod_base = OTHER; note = 2'O-methyl uridine
  modified_base 10: mod_base = OTHER; note = 2'-fluoro uridine
  modified_base 11: mod_base = OTHER; note = 2'O-methyl cytidine
  modified_base 12: mod_base = OTHER; note = 2'-fluoro cytidine
  modified_base 13: mod_base = OTHER; note = 2'O-methyl cytidine
  modified_base 14: mod_base = OTHER; note = 2'-fluoro cytidine
  modified_base 15: mod_base = OTHER; note = 2'O-methyl adenosine
  modified_base 16: mod_base = OTHER; note = 2'-fluoro uridine
  modified_base 17: mod_base = OTHER; note = 2'O-methyl cytidine
  modified_base 18: mod_base = OTHER; note = 2'-fluoro adenosine
  modified_base 19: mod_base = OTHER; note = 2'O-methyl guanosine
  modified_base 20: mod_base = OTHER; note = 2'-fluoro adenosine
  modified_base 21: mod_base = OTHER; note = 2'O-methyl cytidine phosphorothioate
  modified_base 22: mod_base = OTHER; note = 2'O-methyl uridine phosphorothioate
  modified_base 23: mod_base = OTHER; note = 2'O-methyl uridine
agaacgttttccccatcagactt

SEQ ID NO: 2006 - RNA, 23 nt, synthetic construct
  source 1..23: mol_type = other RNA
  modified_base 1: mod_base = OTHER; note = 2'O-methyl cytidine phosphorothioate
  modified_base 2: mod_base = OTHER; note = 2'-fluoro adenosine phosphorothioate
  modified_base 3: mod_base = OTHER; note = 2'O-methyl guanosine
  modified_base 4: mod_base = OTHER; note = 2'-fluoro adenosine
  modified_base 5: mod_base = OTHER; note = 2'O-methyl adenosine
  modified_base 6: mod_base = OTHER; note = 2'-fluoro cytidine
  modified_base 7: mod_base = OTHER; note = 2'O-methyl guanosine
  modified_base 8: mod_base = OTHER; note = 2'-fluoro uridine
  modified_base 9: mod_base = OTHER; note = 2'O-methyl uridine
  modified_base 10: mod_base = OTHER; note = 2'-fluoro uridine
  modified_base 11: mod_base = OTHER; note = 2'O-methyl uridine
  modified_base 12: mod_base = OTHER; note = 2'-fluoro cytidine
  modified_base 13: mod_base = OTHER; note = 2'O-methyl cytidine
  modified_base 14: mod_base = OTHER; note = 2'-fluoro cytidine
  modified_base 15: mod_base = OTHER; note = 2'O-methyl cytidine
  modified_base 16: mod_base = OTHER; note = 2'-fluoro adenosine
  modified_base 17: mod_base = OTHER; note = 2'O-methyl uridine
  modified_base 18: mod_base = OTHER; note = 2'-fluoro cytidine
  modified_base 19: mod_base = OTHER; note = 2'O-methyl adenosine
  modified_base 20: mod_base = OTHER; note = 2'-fluoro guanosine
  modified_base 21: mod_base = OTHER; note = 2'O-methyl adenosine phosphorothioate
  modified_base 22: mod_base = OTHER; note = 2'O-methyl uridine phosphorothioate
  modified_base 23: mod_base = OTHER; note = 2'O-methyl uridine
cagaacgttttccccatcagatt

SEQ ID NO: 2007 - RNA, 23 nt, synthetic construct
  source 1..23: mol_type = other RNA
  modified_base 1: mod_base = OTHER; note = 2'O-methyl cytidine phosphorothioate
  modified_base 2: mod_base = OTHER; note = 2'-fluoro cytidine phosphorothioate
  modified_base 3: mod_base = OTHER; note = 2'O-methyl adenosine
  modified_base 4: mod_base = OTHER; note = 2'-fluoro guanosine
  modified_base 5: mod_base = OTHER; note = 2'O-methyl adenosine
  modified_base 6: mod_base = OTHER; note = 2'-fluoro adenosine
  modified_base 7: mod_base = OTHER; note = 2'O-methyl cytidine
  modified_base 8: mod_base = OTHER; note = 2'-fluoro guanosine
  modified_base 9: mod_base = OTHER; note = 2'O-methyl uridine
  modified_base 10: mod_base = OTHER; note = 2'-fluoro uridine
  modified_base 11: mod_base = OTHER; note = 2'O-methyl uridine
  modified_base 12: mod_base = OTHER; note = 2'-fluoro uridine
  modified_base 13: mod_base = OTHER; note = 2'O-methyl cytidine
  modified_base 14: mod_base = OTHER; note = 2'-fluoro cytidine
  modified_base 15: mod_base = OTHER; note = 2'O-methyl cytidine
  modified_base 16: mod_base = OTHER; note = 2'-fluoro cytidine
  modified_base 17: mod_base = OTHER; note = 2'O-methyl adenosine
  modified_base 18: mod_base = OTHER; note = 2'-fluoro uridine
  modified_base 19: mod_base = OTHER; note = 2'O-methyl cytidine
  modified_base 20: mod_base = OTHER; note = 2'-fluoro adenosine
  modified_base 21: mod_base = OTHER; note = 2'O-methyl guanosine phosphorothioate
  modified_base 22: mod_base = OTHER; note = 2'O-methyl uridine phosphorothioate
  modified_base 23: mod_base = OTHER; note = 2'O-methyl uridine
ccagaacgttttccccatcagtt

SEQ ID NO: 2008 - RNA, 23 nt, synthetic construct
  source 1..23: mol_type = other RNA
  modified_base 1: mod_base = OTHER; note = 2'O-methyl adenosine phosphorothioate
  modified_base 2: mod_base = OTHER; note = 2'-fluoro cytidine phosphorothioate
  modified_base 3: mod_base = OTHER; note = 2'O-methyl cytidine
  modified_base 4: mod_base = OTHER; note = 2'-fluoro adenosine
  modified_base 5: mod_base = OTHER; note = 2'O-methyl guanosine
  modified_base 6: mod_base = OTHER; note = 2'-fluoro adenosine
  modified_base 7: mod_base = OTHER; note = 2'O-methyl adenosine
  modified_base 8: mod_base = OTHER; note = 2'-fluoro cytidine
  modified_base 9: mod_base = OTHER; note = 2'O-methyl guanosine
  modified_base 10: mod_base = OTHER; note = 2'-fluoro uridine
  modified_base 11: mod_base = OTHER; note = 2'O-methyl uridine
  modified_base 12: mod_base = OTHER; note = 2'-fluoro uridine
  modified_base 13: mod_base = OTHER; note = 2'O-methyl uridine
  modified_base 14: mod_base = OTHER; note = 2'-fluoro cytidine
  modified_base 15: mod_base = OTHER; note = 2'O-methyl cytidine
  modified_base 16: mod_base = OTHER; note = 2'-fluoro cytidine
  modified_base 17: mod_base = OTHER; note = 2'O-methyl cytidine
  modified_base 18: mod_base = OTHER; note = 2'-fluoro adenosine
  modified_base 19: mod_base = OTHER; note = 2'O-methyl uridine
  modified_base 20: mod_base = OTHER; note = 2'-fluoro cytidine
  modified_base 21: mod_base = OTHER; note = 2'O-methyl adenosine phosphorothioate
  modified_base 22: mod_base = OTHER; note = 2'O-methyl uridine phosphorothioate
  modified_base 23: mod_base = OTHER; note = 2'O-methyl uridine
accagaacgttttccccatcatt

SEQ ID NO: 2009 - RNA, 23 nt, synthetic construct
  source 1..23: mol_type = other RNA
  modified_base 1: mod_base = OTHER; note = 2'O-methyl cytidine phosphorothioate
  modified_base 2: mod_base = OTHER; note = 2'-fluoro adenosine phosphorothioate
  modified_base 3: mod_base = OTHER; note = 2'O-methyl cytidine
  modified_base 4: mod_base = OTHER; note = 2'-fluoro cytidine
  modified_base 5: mod_base = OTHER; note = 2'O-methyl adenosine
  modified_base 6: mod_base = OTHER; note = 2'-fluoro guanosine
  modified_base 7: mod_base = OTHER; note = 2'O-methyl adenosine
  modified_base 8: mod_base = OTHER; note = 2'-fluoro adenosine
  modified_base 9: mod_base = OTHER; note = 2'O-methyl cytidine
  modified_base 10: mod_base = OTHER; note = 2'-fluoro guanosine
  modified_base 11: mod_base = OTHER; note = 2'O-methyl uridine
  modified_base 12: mod_base = OTHER; note = 2'-fluoro uridine
  modified_base 13: mod_base = OTHER; note = 2'O-methyl uridine
  modified_base 14: mod_base = OTHER; note = 2'-fluoro uridine
  modified_base 15: mod_base = OTHER; note = 2'O-methyl cytidine
  modified_base 16: mod_base = OTHER; note = 2'-fluoro cytidine
  modified_base 17: mod_base = OTHER; note = 2'O-methyl cytidine
  modified_base 18: mod_base = OTHER; note = 2'-fluoro cytidine
  modified_base 19: mod_base = OTHER; note = 2'O-methyl adenosine
  modified_base 20: mod_base = OTHER; note = 2'-fluoro uridine
  modified_base 21: mod_base = OTHER; note = 2'O-methyl cytidine phosphorothioate
  modified_base 22: mod_base = OTHER; note = 2'O-methyl uridine phosphorothioate
  modified_base 23: mod_base = OTHER; note = 2'O-methyl uridine
caccagaacgttttccccatctt

SEQ ID NO: 2010 - RNA, 23 nt, synthetic construct
  source 1..23: mol_type = other RNA
  modified_base 1: mod_base = OTHER; note = 2'O-methyl guanosine phosphorothioate
  modified_base 2: mod_base = OTHER; note = 2'-fluoro adenosine phosphorothioate
  modified_base 3: mod_base = OTHER; note = 2'O-methyl cytidine
  modified_base 4: mod_base = OTHER; note = 2'-fluoro adenosine
  modified_base 5: mod_base = OTHER; note = 2'O-methyl cytidine
  modified_base 6: mod_base = OTHER; note = 2'-fluoro cytidine
  modified_base 7: mod_base = OTHER; note = 2'O-methyl adenosine
  modified_base 8: mod_base = OTHER; note = 2'-fluoro guanosine
  modified_base 9: mod_base = OTHER; note = 2'O-methyl adenosine
  modified_base 10: mod_base = OTHER; note = 2'-fluoro adenosine
  modified_base 11: mod_base = OTHER; note = 2'O-methyl cytidine
  modified_base 12: mod_base = OTHER; note = 2'-fluoro guanosine
  modified_base 13: mod_base = OTHER; note = 2'O-methyl uridine
  modified_base 14: mod_base = OTHER; note = 2'-fluoro uridine
  modified_base 15: mod_base = OTHER; note = 2'O-methyl uridine
  modified_base 16: mod_base = OTHER; note = 2'-fluoro uridine
  modified_base 17: mod_base = OTHER; note = 2'O-methyl cytidine
  modified_base 18: mod_base = OTHER; note = 2'-fluoro cytidine
  modified_base 19: mod_base = OTHER; note = 2'O-methyl cytidine
  modified_base 20: mod_base = OTHER; note = 2'-fluoro cytidine
  modified_base 21: mod_base = OTHER; note = 2'O-methyl adenosine phosphorothioate
  modified_base 22: mod_base = OTHER; note = 2'O-methyl uridine phosphorothioate
  modified_base 23: mod_base = OTHER; note = 2'O-methyl uridine
gacaccagaacgttttccccatt

SEQ ID NO: 2011 - RNA, 23 nt, synthetic construct
  source 1..23: mol_type = other RNA
  modified_base 1: mod_base = OTHER; note = 2'O-methyl cytidine phosphorothioate
  modified_base 2: mod_base = OTHER; note = 2'-fluoro adenosine phosphorothioate
  modified_base 3: mod_base = OTHER; note = 2'O-methyl guanosine
  modified_base 4: mod_base = OTHER; note = 2'-fluoro adenosine
  modified_base 5: mod_base = OTHER; note = 2'O-methyl cytidine
  modified_base 6: mod_base = OTHER; note = 2'-fluoro adenosine
  modified_base 7: mod_base = OTHER; note = 2'O-methyl cytidine
  modified_base 8: mod_base = OTHER; note = 2'-fluoro cytidine
  modified_base 9: mod_base = OTHER; note = 2'O-methyl adenosine
  modified_base 10: mod_base = OTHER; note = 2'-fluoro guanosine
  modified_base 11: mod_base = OTHER; note = 2'O-methyl adenosine
  modified_base 12: mod_base = OTHER; note = 2'-fluoro adenosine
  modified_base 13: mod_base = OTHER; note = 2'O-methyl cytidine
  modified_base 14: mod_base = OTHER; note = 2'-fluoro guanosine
  modified_base 15: mod_base = OTHER; note = 2'O-methyl uridine
  modified_base 16: mod_base = OTHER; note = 2'-fluoro uridine
  modified_base 17: mod_base = OTHER; note = 2'O-methyl uridine
  modified_base 18: mod_base = OTHER; note = 2'-fluoro uridine
  modified_base 19: mod_base = OTHER; note = 2'O-methyl cytidine
  modified_base 20: mod_base = OTHER; note = 2'-fluoro cytidine
  modified_base 21: mod_base = OTHER; note = 2'O-methyl cytidine phosphorothioate
  modified_base 22: mod_base = OTHER; note = 2'O-methyl uridine phosphorothioate
  modified_base 23: mod_base = OTHER; note = 2'O-methyl uridine
cagacaccagaacgttttccctt

SEQ ID NO: 2012 - RNA, 23 nt, synthetic construct
  source 1..23: mol_type = other RNA
  modified_base 1: mod_base = OTHER; note = 2'O-methyl uridine phosphorothioate
  modified_base 2: mod_base = OTHER; note = 2'-fluoro cytidine phosphorothioate
  modified_base 3: mod_base = OTHER; note = 2'O-methyl adenosine
  modified_base 4: mod_base = OTHER; note = 2'-fluoro guanosine
  modified_base 5: mod_base = OTHER; note = 2'O-methyl adenosine
  modified_base 6: mod_base = OTHER; note = 2'-fluoro cytidine
  modified_base 7: mod_base = OTHER; note = 2'O-methyl adenosine
  modified_base 8: mod_base = OTHER; note = 2'-fluoro cytidine
  modified_base 9: mod_base = OTHER; note = 2'O-methyl cytidine
  modified_base 10: mod_base = OTHER; note = 2'-fluoro adenosine
  modified_base 11: mod_base = OTHER; note = 2'O-methyl guanosine
  modified_base 12: mod_base = OTHER; note = 2'-fluoro adenosine
  modified_base 13: mod_base = OTHER; note = 2'O-methyl adenosine
  modified_base 14: mod_base = OTHER; note = 2'-fluoro cytidine
  modified_base 15: mod_base = OTHER; note = 2'O-methyl guanosine
  modified_base 16: mod_base = OTHER; note = 2'-fluoro uridine
  modified_base 17: mod_base = OTHER; note = 2'O-methyl uridine
  modified_base 18: mod_base = OTHER; note = 2'-fluoro uridine
  modified_base 19: mod_base = OTHER; note = 2'O-methyl uridine
  modified_base 20: mod_base = OTHER; note = 2'-fluoro cytidine
  modified_base 21: mod_base = OTHER; note = 2'O-methyl cytidine phosphorothioate
  modified_base 22: mod_base = OTHER; note = 2'O-methyl uridine phosphorothioate
  modified_base 23: mod_base = OTHER; note = 2'O-methyl uridine
tcagacaccagaacgttttcctt

SEQ ID NO: 2013 - RNA, 23 nt, synthetic construct
  source 1..23: mol_type = other RNA
  modified_base 1: mod_base = OTHER; note = 2'O-methyl adenosine phosphorothioate
  modified_base 2: mod_base = OTHER; note = 2'-fluoro adenosine phosphorothioate
  modified_base 3: mod_base = OTHER; note = 2'O-methyl guanosine
  modified_base 4: mod_base = OTHER; note = 2'-fluoro uridine
  modified_base 5: mod_base = OTHER; note = 2'O-methyl cytidine
  modified_base 6: mod_base = OTHER; note = 2'-fluoro adenosine
  modified_base 7: mod_base = OTHER; note = 2'O-methyl guanosine
  modified_base 8: mod_base = OTHER; note = 2'-fluoro adenosine
  modified_base 9: mod_base = OTHER; note = 2'O-methyl cytidine
  modified_base 10: mod_base = OTHER; note = 2'-fluoro adenosine
  modified_base 11: mod_base = OTHER; note = 2'O-methyl cytidine
  modified_base 12: mod_base = OTHER; note = 2'-fluoro cytidine
  modified_base 13: mod_base = OTHER; note = 2'O-methyl adenosine
  modified_base 14: mod_base = OTHER; note = 2'-fluoro guanosine
  modified_base 15: mod_base = OTHER; note = 2'O-methyl adenosine
  modified_base 16: mod_base = OTHER; note = 2'-fluoro adenosine
  modified_base 17: mod_base = OTHER; note = 2'O-methyl cytidine
  modified_base 18: mod_base = OTHER; note = 2'-fluoro guanosine
  modified_base 19: mod_base = OTHER; note = 2'O-methyl uridine
  modified_base 20: mod_base = OTHER; note = 2'-fluoro uridine
  modified_base 21: mod_base = OTHER; note = 2'O-methyl uridine phosphorothioate
  modified_base 22: mod_base = OTHER; note = 2'O-methyl uridine phosphorothioate
  modified_base 23: mod_base = OTHER; note = 2'O-methyl uridine
aagtcagacaccagaacgttttt

SEQ ID NO: 2014 - RNA, 23 nt, synthetic construct
  source 1..23: mol_type = other RNA
  modified_base 1: mod_base = OTHER; note = 2'O-methyl adenosine phosphorothioate
  modified_base 2: mod_base = OTHER; note = 2'-fluoro adenosine phosphorothioate
  modified_base 3: mod_base = OTHER; note = 2'O-methyl adenosine
  modified_base 4: mod_base = OTHER; note = 2'-fluoro guanosine
  modified_base 5: mod_base = OTHER; note = 2'O-methyl uridine
  modified_base 6: mod_base = OTHER; note = 2'-fluoro cytidine
  modified_base 7: mod_base = OTHER; note = 2'O-methyl adenosine
  modified_base 8: mod_base = OTHER; note = 2'-fluoro guanosine
  modified_base 9: mod_base = OTHER; note = 2'O-methyl adenosine
  modified_base 10: mod_base = OTHER; note = 2'-fluoro cytidine
  modified_base 11: mod_base = OTHER; note = 2'O-methyl adenosine
  modified_base 12: mod_base = OTHER; note = 2'-fluoro cytidine
  modified_base 13: mod_base = OTHER; note = 2'O-methyl cytidine
  modified_base 14: mod_base = OTHER; note = 2'-fluoro adenosine
  modified_base 15: mod_base = OTHER; note = 2'O-methyl guanosine
  modified_base 16: mod_base = OTHER; note = 2'-fluoro adenosine
  modified_base 17: mod_base = OTHER; note = 2'O-methyl adenosine
  modified_base 18: mod_base = OTHER; note = 2'-fluoro cytidine
  modified_base 19: mod_base = OTHER; note = 2'O-methyl guanosine
  modified_base 20: mod_base = OTHER; note = 2'-fluoro uridine
  modified_base 21: mod_base = OTHER; note = 2'O-methyl uridine phosphorothioate
  modified_base 22: mod_base = OTHER; note = 2'O-methyl uridine phosphorothioate
  modified_base 23: mod_base = OTHER; note = 2'O-methyl uridine
aaagtcagacaccagaacgtttt

SEQ ID NO: 2015 - RNA, 23 nt, synthetic construct
  source 1..23: mol_type = other RNA
  modified_base 1: mod_base = OTHER; note = 2'O-methyl guanosine phosphorothioate
  modified_base 2: mod_base = OTHER; note = 2'-fluoro adenosine phosphorothioate
  modified_base 3: mod_base = OTHER; note = 2'O-methyl adenosine
  modified_base 4: mod_base = OTHER; note = 2'-fluoro adenosine
  modified_base 5: mod_base = OTHER; note = 2'O-methyl guanosine
  modified_base 6: mod_base = OTHER; note = 2'-fluoro uridine
  modified_base 7: mod_base = OTHER; note = 2'O-methyl cytidine
  modified_base 8: mod_base = OTHER; note = 2'-fluoro adenosine
  modified_base 9: mod_base = OTHER; note = 2'O-methyl guanosine
  modified_base 10: mod_base = OTHER; note = 2'-fluoro adenosine
  modified_base 11: mod_base = OTHER; note = 2'O-methyl cytidine
  modified_base 12: mod_base = OTHER; note = 2'-fluoro adenosine
  modified_base 13: mod_base = OTHER; note = 2'O-methyl cytidine
  modified_base 14: mod_base = OTHER; note = 2'-fluoro cytidine
  modified_base 15: mod_base = OTHER; note = 2'O-methyl adenosine
  modified_base 16: mod_base = OTHER; note = 2'-fluoro guanosine
  modified_base 17: mod_base = OTHER; note = 2'O-methyl adenosine
  modified_base 18: mod_base = OTHER; note = 2'-fluoro adenosine
  modified_base 19: mod_base = OTHER; note = 2'O-methyl cytidine
  modified_base 20: mod_base = OTHER; note = 2'-fluoro guanosine
  modified_base 21: mod_base = OTHER; note = 2'O-methyl uridine phosphorothioate
  modified_base 22: mod_base = OTHER; note = 2'O-methyl uridine phosphorothioate
  modified_base 23: mod_base = OTHER; note = 2'O-methyl uridine
gaaagtcagacaccagaacgttt

SEQ ID NO: 2016 - RNA, 23 nt, synthetic construct
  source 1..23: mol_type = other RNA
  modified_base 1: mod_base = OTHER; note = 2'O-methyl cytidine phosphorothioate
  modified_base 2: mod_base = OTHER; note = 2'-fluoro guanosine phosphorothioate
  modified_base 3: mod_base = OTHER; note = 2'O-methyl adenosine
  modified_base 4: mod_base = OTHER; note = 2'-fluoro adenosine
  modified_base 5: mod_base = OTHER; note = 2'O-methyl adenosine
  modified_base 6: mod_base = OTHER; note = 2'-fluoro guanosine
  modified_base 7: mod_base = OTHER; note = 2'O-methyl uridine
  modified_base 8: mod_base = OTHER; note = 2'-fluoro cytidine
  modified_base 9: mod_base = OTHER; note = 2'O-methyl adenosine
  modified_base 10: mod_base = OTHER; note = 2'-fluoro guanosine
  modified_base 11: mod_base = OTHER; note = 2'O-methyl adenosine
  modified_base 12: mod_base = OTHER; note = 2'-fluoro cytidine
  modified_base 13: mod_base = OTHER; note = 2'O-methyl adenosine
  modified_base 14: mod_base = OTHER; note = 2'-fluoro cytidine
  modified_base 15: mod_base = OTHER; note = 2'O-methyl cytidine
  modified_base 16: mod_base = OTHER; note = 2'-fluoro adenosine
  modified_base 17: mod_base = OTHER; note = 2'O-methyl guanosine
  modified_base 18: mod_base = OTHER; note = 2'-fluoro adenosine
  modified_base 19: mod_base = OTHER; note = 2'O-methyl adenosine
  modified_base 20: mod_base = OTHER; note = 2'-fluoro cytidine
  modified_base 21: mod_base = OTHER; note = 2'O-methyl guanosine phosphorothioate
  modified_base 22: mod_base = OTHER; note = 2'O-methyl uridine phosphorothioate
  modified_base 23: mod_base = OTHER; note = 2'O-methyl uridine
cgaaagtcagacaccagaacgtt

SEQ ID NO: 2017 - RNA, 23 nt, synthetic construct
  source 1..23: mol_type = other RNA
  modified_base 1: mod_base = OTHER; note = 2'O-methyl guanosine phosphorothioate
  modified_base 2: mod_base = OTHER; note = 2'-fluoro guanosine phosphorothioate
  modified_base 3: mod_base = OTHER; note = 2'O-methyl adenosine
  modified_base 4: mod_base = OTHER; note = 2'-fluoro cytidine
  modified_base 5: mod_base = OTHER; note = 2'O-methyl cytidine
  modified_base 6: mod_base = OTHER; note = 2'-fluoro guanosine
  modified_base 7: mod_base = OTHER; note = 2'O-methyl adenosine
  modified_base 8: mod_base = OTHER; note = 2'-fluoro adenosine
  modified_base 9: mod_base = OTHER; note = 2'O-methyl adenosine
  modified_base 10: mod_base = OTHER; note = 2'-fluoro guanosine
  modified_base 11: mod_base = OTHER; note = 2'O-methyl uridine
  modified_base 12: mod_base = OTHER; note = 2'-fluoro cytidine
  modified_base 13: mod_base = OTHER; note = 2'O-methyl adenosine
  modified_base 14: mod_base = OTHER; note = 2'-fluoro guanosine
  modified_base 15: mod_base = OTHER; note = 2'O-methyl adenosine
  modified_base 16: mod_base = OTHER; note = 2'-fluoro cytidine
  modified_base 17: mod_base = OTHER; note = 2'O-methyl adenosine
  modified_base 18: mod_base = OTHER; note = 2'-fluoro cytidine
  modified_base 19: mod_base = OTHER; note = 2'O-methyl cytidine
  modified_base 20: mod_base = OTHER; note = 2'-fluoro adenosine
  modified_base 21: mod_base = OTHER; note = 2'O-methyl guanosine phosphorothioate
  modified_base 22: mod_base = OTHER; note = 2'O-methyl uridine phosphorothioate
  modified_base 23: mod_base = OTHER; note = 2'O-methyl uridine
ggaccgaaagtcagacaccagtt

SEQ ID NO: 2018 - RNA, 23 nt, synthetic construct
  source 1..23: mol_type = other RNA
  modified_base 1: mod_base = OTHER; note = 2'O-methyl uridine phosphorothioate
  modified_base 2: mod_base = OTHER; note = 2'-fluoro guanosine phosphorothioate
  modified_base 3: mod_base = OTHER; note = 2'O-methyl guanosine
  modified_base 4: mod_base = OTHER; note = 2'-fluoro adenosine
  modified_base 5: mod_base = OTHER; note = 2'O-methyl cytidine
  modified_base 6: mod_base = OTHER; note = 2'-fluoro cytidine
  modified_base 7: mod_base = OTHER; note = 2'O-methyl guanosine
  modified_base 8: mod_base = OTHER; note = 2'-fluoro adenosine
  modified_base 9: mod_base = OTHER; note = 2'O-methyl adenosine
  modified_base 10: mod_base = OTHER; note = 2'-fluoro adenosine
  modified_base 11: mod_base = OTHER; note = 2'O-methyl guanosine
  modified_base 12: mod_base = OTHER; note = 2'-fluoro uridine
  modified_base 13: mod_base = OTHER; note = 2'O-methyl cytidine
  modified_base 14: mod_base = OTHER; note = 2'-fluoro adenosine
  modified_base 15: mod_base = OTHER; note = 2'O-methyl guanosine
  modified_base 16: mod_base = OTHER; note = 2'-fluoro adenosine
  modified_base 17: mod_base = OTHER; note = 2'O-methyl cytidine
  modified_base 18: mod_base = OTHER; note = 2'-fluoro adenosine
  modified_base 19: mod_base = OTHER; note = 2'O-methyl cytidine
  modified_base 20: mod_base = OTHER; note = 2'-fluoro cytidine
  modified_base 21: mod_base = OTHER; note = 2'O-methyl adenosine phosphorothioate
  modified_base 22: mod_base = OTHER; note = 2'O-methyl uridine phosphorothioate
  modified_base 23: mod_base = OTHER; note = 2'O-methyl uridine
tggaccgaaagtcagacaccatt

SEQ ID NO: 2019 - RNA, 23 nt, synthetic construct
  source 1..23: mol_type = other RNA
  modified_base 1: mod_base = OTHER; note = 2'O-methyl uridine phosphorothioate
  modified_base 2: mod_base = OTHER; note = 2'-fluoro cytidine phosphorothioate
  modified_base 3: mod_base = OTHER; note = 2'O-methyl cytidine
  modified_base 4: mod_base = OTHER; note = 2'O-methyl cytidine
  modified_base 5: mod_base = OTHER; note = 2'O-methyl cytidine
  modified_base 6: mod_base = OTHER; note = 2'-fluoro adenosine
  modified_base 7: mod_base = OTHER; note = 2'O-methyl uridine
  modified_base 8: mod_base = OTHER; note = 2'O-methyl cytidine
  modified_base 9: mod_base = OTHER; note = 2'O-methyl adenosine
  modified_base 10: mod_base = OTHER; note = 2'O-methyl guanosine
  modified_base 11: mod_base = OTHER; note = 2'O-methyl adenosine
  modified_base 12: mod_base = OTHER; note = 2'O-methyl cytidine
  modified_base 13: mod_base = OTHER; note = 2'O-methyl adenosine
  modified_base 14: mod_base = OTHER; note = 2'-fluoro cytidine
  modified_base 15: mod_base = OTHER; note = 2'O-methyl uridine
  modified_base 16: mod_base = OTHER; note = 2'-fluoro cytidine
  modified_base 17: mod_base = OTHER; note = 2'O-methyl uridine
  modified_base 18: mod_base = OTHER; note = 2'O-methyl guanosine
  modified_base 19: mod_base = OTHER; note = 2'O-methyl guanosine
  modified_base 20: mod_base = OTHER; note = 2'O-methyl uridine
  modified_base 21: mod_base = OTHER; note = 2'O-methyl adenosine phosphorothioate
  modified_base 22: mod_base = OTHER; note = 2'O-methyl uridine phosphorothioate
  modified_base 23: mod_base = OTHER; note = 2'O-methyl uridine
tccccatcagacactctggtatt

SEQ ID NO: 2020 - RNA, 23 nt, synthetic construct
  source 1..23: mol_type = other RNA
  modified_base 1: mod_base = OTHER; note = 2'O-methyl uridine phosphorothioate
  modified_base 2: mod_base = OTHER; note = 2'-fluoro uridine phosphorothioate
  modified_base 3: mod_base = OTHER; note = 2'O-methyl uridine
  modified_base 4: mod_base = OTHER; note = 2'O-methyl guanosine
  modified_base 5: mod_base = OTHER; note = 2'O-methyl guanosine
  modified_base 6: mod_base = OTHER; note = 2'-fluoro adenosine
  modified_base 7: mod_base = OTHER; note = 2'O-methyl cytidine
  modified_base 8: mod_base = OTHER; note = 2'O-methyl cytidine
  modified_base 9: mod_base = OTHER; note = 2'O-methyl guanosine
  modified_base 10: mod_base = OTHER; note = 2'O-methyl adenosine
  modified_base 11: mod_base = OTHER; note = 2'O-methyl adenosine
  modified_base 12: mod_base = OTHER; note = 2'O-methyl adenosine
  modified_base 13: mod_base = OTHER; note = 2'O-methyl guanosine
  modified_base 14: mod_base = OTHER; note = 2'-fluoro uridine
  modified_base 15: mod_base = OTHER; note = 2'O-methyl cytidine
  modified_base 16: mod_base = OTHER; note = 2'-fluoro adenosine
  modified_base 17: mod_base = OTHER; note = 2'O-methyl guanosine
  modified_base 18: mod_base = OTHER; note = 2'O-methyl adenosine
  modified_base 19: mod_base = OTHER; note = 2'O-methyl cytidine
  modified_base 20: mod_base = OTHER; note = 2'O-methyl adenosine
  modified_base 21: mod_base = OTHER; note = 2'O-methyl cytidine phosphorothioate
  modified_base 22: mod_base = OTHER; note = 2'O-methyl uridine phosphorothioate
  modified_base 23: mod_base = OTHER; note = 2'O-methyl uridine
tttggaccgaaagtcagacactt

SEQ ID NO: 2021 - RNA, 23 nt, synthetic construct
  source 1..23: mol_type = other RNA
  modified_base 1: mod_base = OTHER; note = 2'O-methyl adenosine phosphorothioate
  modified_base 2: mod_base = OTHER; note = 2'-fluoro uridine phosphorothioate
  modified_base 3: mod_base = OTHER; note = 2'O-methyl cytidine
  modified_base 4: mod_base = OTHER; note = 2'O-methyl cytidine
  modified_base 5: mod_base = OTHER; note = 2'O-methyl adenosine
  modified_base 6: mod_base = OTHER; note = 2'-fluoro cytidine
  modified_base 7: mod_base = OTHER; note = 2'O-methyl guanosine
  modified_base 8: mod_base = OTHER; note = 2'O-methyl adenosine
  modified_base 9: mod_base = OTHER; note = 2'O-methyl cytidine
  modified_base 10: mod_base = OTHER; note = 2'O-methyl uridine
  modified_base 11: mod_base = OTHER; note = 2'O-methyl uridine
  modified_base 12: mod_base = OTHER; note = 2'O-methyl cytidine
  modified_base 13: mod_base = OTHER; note = 2'O-methyl guanosine
  modified_base 14: mod_base = OTHER; note = 2'-fluoro uridine
  modified_base 15: mod_base = OTHER; note = 2'O-methyl cytidine
  modified_base 16: mod_base = OTHER; note = 2'-fluoro uridine
  modified_base 17: mod_base = OTHER; note = 2'O-methyl uridine
  modified_base 18: mod_base = OTHER; note = 2'O-methyl uridine
  modified_base 19: mod_base = OTHER; note = 2'O-methyl guanosine
  modified_base 20: mod_base = OTHER; note = 2'O-methyl guanosine
  modified_base 21: mod_base = OTHER; note = 2'O-methyl adenosine phosphorothioate
  modified_base 22: mod_base = OTHER; note = 2'O-methyl uridine phosphorothioate
  modified_base 23: mod_base = OTHER; note = 2'O-methyl uridine
atccacgacttcgtctttggatt

SEQ ID NO: 2022 - RNA, 23 nt, synthetic construct
  source 1..23: mol_type = other RNA
  modified_base 1: mod_base = OTHER; note = 2'O-methyl uridine phosphorothioate
  modified_base 2: mod_base = OTHER; note = 2'-fluoro adenosine phosphorothioate
  modified_base 3: mod_base = OTHER; note = 2'O-methyl cytidine
  modified_base 4: mod_base = OTHER; note = 2'O-methyl cytidine
  modified_base 5: mod_base = OTHER; note = 2'O-methyl adenosine
  modified_base 6: mod_base = OTHER; note = 2'-fluoro adenosine
  modified_base 7: mod_base = OTHER; note = 2'O-methyl guanosine
  modified_base 8: mod_base = OTHER; note = 2'O-methyl guanosine
  modified_base 9: mod_base = OTHER; note = 2'O-methyl cytidine
  modified_base 10: mod_base = OTHER; note = 2'O-methyl adenosine
  modified_base 11: mod_base = OTHER; note = 2'O-methyl uridine
  modified_base 12: mod_base = OTHER; note = 2'O-methyl cytidine
  modified_base 13: mod_base = OTHER; note = 2'O-methyl cytidine
  modified_base 14: mod_base = OTHER; note = 2'-fluoro adenosine
  modified_base 15: mod_base = OTHER; note = 2'O-methyl cytidine
  modified_base 16: mod_base = OTHER; note = 2'-fluoro guanosine
  modified_base 17: mod_base = OTHER; note = 2'O-methyl adenosine
  modified_base 18: mod_base = OTHER; note = 2'O-methyl cytidine
  modified_base 19: mod_base = OTHER; note = 2'O-methyl uridine
  modified_base 20: mod_base = OTHER; note = 2'O-methyl uridine
  modified_base 21: mod_base = OTHER; note = 2'O-methyl cytidine phosphorothioate
  modified_base 22: mod_base = OTHER; note = 2'O-methyl uridine phosphorothioate
  modified_base 23: mod_base = OTHER; note = 2'O-methyl uridine
taccaaggcatccacgacttctt

SEQ ID NO: 2023 - RNA, 23 nt, synthetic construct
  source 1..23: mol_type = other RNA
  modified_base 1: mod_base = OTHER; note = 2'O-methyl adenosine phosphorothioate
  modified_base 2: mod_base = OTHER; note = 2'-fluoro cytidine phosphorothioate
  modified_base 3: mod_base = OTHER; note = 2'O-methyl adenosine
  modified_base 4: mod_base = OTHER; note = 2'O-methyl uridine
  modified_base 5: mod_base = OTHER; note = 2'O-methyl adenosine
  modified_base 6: mod_base = OTHER; note = 2'-fluoro cytidine
  modified_base 7: mod_base = OTHER; note = 2'O-methyl cytidine
  modified_base 8: mod_base = OTHER; note = 2'O-methyl adenosine
  modified_base 9: mod_base = OTHER; note = 2'O-methyl adenosine
  modified_base 10: mod_base = OTHER; note = 2'O-methyl guanosine
  modified_base 11: mod_base = OTHER; note = 2'O-methyl guanosine
  modified_base 12: mod_base = OTHER; note = 2'O-methyl cytidine
  modified_base 13: mod_base = OTHER; note = 2'O-methyl adenosine
  modified_base 14: mod_base = OTHER; note = 2'-fluoro uridine
  modified_base 15: mod_base = OTHER; note = 2'O-methyl cytidine
  modified_base 16: mod_base = OTHER; note = 2'-fluoro cytidine
  modified_base 17: mod_base = OTHER; note = 2'O-methyl adenosine
  modified_base 18: mod_base = OTHER; note = 2'O-methyl cytidine
  modified_base 19: mod_base = OTHER; note = 2'O-methyl guanosine
  modified_base 20: mod_base = OTHER; note = 2'O-methyl adenosine
  modified_base 21: mod_base = OTHER; note = 2'O-methyl cytidine phosphorothioate
  modified_base 22: mod_base = OTHER; note = 2'O-methyl uridine phosphorothioate
  modified_base 23: mod_base = OTHER; note = 2'O-methyl uridine
acataccaaggcatccacgactt

SEQ ID NO: 2024 - RNA, 23 nt, synthetic construct
  source 1..23: mol_type = other RNA
  modified_base 1: mod_base = OTHER; note = 2'O-methyl adenosine phosphorothioate
  modified_base 2: mod_base = OTHER; note = 2'-fluoro adenosine phosphorothioate
  modified_base 3: mod_base = OTHER; note = 2'O-methyl cytidine
  modified_base 4: mod_base = OTHER; note = 2'O-methyl adenosine
  modified_base 5: mod_base = OTHER; note = 2'O-methyl uridine
  modified_base 6: mod_base = OTHER; note = 2'-fluoro adenosine
  modified_base 7: mod_base = OTHER; note = 2'O-methyl cytidine
  modified_base 8: mod_base = OTHER; note = 2'O-methyl cytidine
  modified_base 9: mod_base = OTHER; note = 2'O-methyl adenosine
  modified_base 10: mod_base = OTHER; note = 2'O-methyl adenosine
  modified_base 11: mod_base = OTHER; note = 2'O-methyl guanosine
  modified_base 12: mod_base = OTHER; note = 2'O-methyl guanosine
  modified_base 13: mod_base = OTHER; note = 2'O-methyl cytidine
  modified_base 14: mod_base = OTHER; note = 2'-fluoro adenosine
  modified_base 15: mod_base = OTHER; note = 2'O-methyl uridine
  modified_base 16: mod_base = OTHER; note = 2'-fluoro cytidine
  modified_base 17: mod_base = OTHER; note = 2'O-methyl cytidine
  modified_base 18: mod_base = OTHER; note = 2'O-methyl adenosine
  modified_base 19: mod_base = OTHER; note = 2'O-methyl cytidine
  modified_base 20: mod_base = OTHER; note = 2'O-methyl guanosine
  modified_base 21: mod_base = OTHER; note = 2'O-methyl adenosine phosphorothioate
  modified_base 22: mod_base = OTHER; note = 2'O-methyl uridine phosphorothioate
  modified_base 23: mod_base = OTHER; note = 2'O-methyl uridine
aacataccaaggcatccacgatt

SEQ ID NO: 2025 - RNA, 23 nt, synthetic construct
  source 1..23: mol_type = other RNA
  modified_base 1: mod_base = OTHER; note = 2'O-methyl guanosine phosphorothioate
  modified_base 2: mod_base = OTHER; note = 2'-fluoro adenosine phosphorothioate
  modified_base 3: mod_base = OTHER; note = 2'O-methyl adenosine
  modified_base 4: mod_base = OTHER; note = 2'O-methyl guanosine
  modified_base 5: mod_base = OTHER; note = 2'O-methyl cytidine
  modified_base 6: mod_base = OTHER; note = 2'-fluoro adenosine
  modified_base 7: mod_base = OTHER; note = 2'O-methyl guanosine
  modified_base 8: mod_base = OTHER; note = 2'O-methyl guanosine
  modified_base 9: mod_base = OTHER; note = 2'O-methyl adenosine
  modified_base 10: mod_base = OTHER; note = 2'O-methyl adenosine
  modified_base 11: mod_base = OTHER; note = 2'O-methyl cytidine
  modified_base 12: mod_base = OTHER; note = 2'O-methyl adenosine
  modified_base 13: mod_base = OTHER; note = 2'O-methyl uridine
  modified_base 14: mod_base = OTHER; note = 2'-fluoro adenosine
  modified_base 15: mod_base = OTHER; note = 2'O-methyl cytidine
  modified_base 16: mod_base = OTHER; note = 2'-fluoro cytidine
  modified_base 17: mod_base = OTHER; note = 2'O-methyl adenosine
  modified_base 18: mod_base = OTHER; note = 2'O-methyl adenosine
  modified_base 19: mod_base = OTHER; note = 2'O-methyl guanosine
  modified_base 20: mod_base = OTHER; note = 2'O-methyl guanosine
  modified_base 21: mod_base = OTHER; note = 2'O-methyl cytidine phosphorothioate
  modified_base 22: mod_base = OTHER; note = 2'O-methyl uridine phosphorothioate
  modified_base 23: mod_base = OTHER; note = 2'O-methyl uridine
gaagcaggaacataccaaggctt

SEQ ID NO: 2026 - RNA, 23 nt, synthetic construct
  source 1..23: mol_type = other RNA
  modified_base 1: mod_base = OTHER; note = 2'O-methyl cytidine phosphorothioate
  modified_base 2: mod_base = OTHER; note = 2'-fluoro guanosine phosphorothioate
  modified_base 3: mod_base = OTHER; note = 2'O-methyl guanosine
  modified_base 4: mod_base = OTHER; note = 2'O-methyl uridine
  modified_base 5: mod_base = OTHER; note = 2'O-methyl guanosine
  modified_base 6: mod_base = OTHER; note = 2'-fluoro adenosine
  modified_base 7: mod_base = OTHER; note = 2'O-methyl uridine
  modified_base 8: mod_base = OTHER; note = 2'O-methyl guanosine
  modified_base 9: mod_base = OTHER; note = 2'O-methyl guanosine
  modified_base 10: mod_base = OTHER; note = 2'O-methyl uridine
  modified_base 11: mod_base = OTHER; note = 2'O-methyl uridine
  modified_base 12: mod_base = OTHER; note = 2'O-methyl guanosine
  modified_base 13: mod_base = OTHER; note = 2'O-methyl uridine
  modified_base 14: mod_base = OTHER; note = 2'-fluoro uridine
  modified_base 15: mod_base = OTHER; note = 2'O-methyl uridine
  modified_base 16: mod_base = OTHER; note = 2'-fluoro uridine
  modified_base 17: mod_base = OTHER; note = 2'O-methyl guanosine
  modified_base 18: mod_base = OTHER; note = 2'O-methyl guanosine
  modified_base 19: mod_base = OTHER; note = 2'O-methyl cytidine
  modified_base 20: mod_base = OTHER; note = 2'O-methyl adenosine
  modified_base 21: mod_base = OTHER; note = 2'O-methyl uridine phosphorothioate
  modified_base 22: mod_base = OTHER; note = 2'O-methyl uridine phosphorothioate
  modified_base 23: mod_base = OTHER; note = 2'O-methyl uridine
cggtgatggttgttttggcattt

SEQ ID NO: 2027 - RNA, 23 nt, synthetic construct
  source 1..23: mol_type = other RNA
  modified_base 1: mod_base = OTHER; note = 2'O-methyl adenosine phosphorothioate
  modified_base 2: mod_base = OTHER; note = 2'-fluoro cytidine phosphorothioate
  modified_base 3: mod_base = OTHER; note = 2'O-methyl adenosine
  modified_base 4: mod_base = OTHER; note = 2'O-methyl cytidine
  modified_base 5: mod_base = OTHER; note = 2'O-methyl guanosine
  modified_base 6: mod_base = OTHER; note = 2'-fluoro guanosine
  modified_base 7: mod_base = OTHER; note = 2'O-methyl uridine
  modified_base 8: mod_base = OTHER; note = 2'O-methyl guanosine
  modified_base 9: mod_base = OTHER; note = 2'O-methyl adenosine
  modified_base 10: mod_base = OTHER; note = 2'O-methyl uridine
  modified_base 11: mod_base = OTHER; note = 2'O-methyl guanosine
  modified_base 12: mod_base = OTHER; note = 2'O-methyl guanosine
  modified_base 13: mod_base = OTHER; note = 2'O-methyl uridine
  modified_base 14: mod_base = OTHER; note = 2'-fluoro uridine
  modified_base 15: mod_base = OTHER; note = 2'O-methyl guanosine
  modified_base 16: mod_base = OTHER; note = 2'-fluoro uridine
  modified_base 17: mod_base = OTHER; note = 2'O-methyl uridine
  modified_base 18: mod_base = OTHER; note = 2'O-methyl uridine
  modified_base 19: mod_base = OTHER; note = 2'O-methyl uridine
  modified_base 20: mod_base = OTHER; note = 2'O-methyl guanosine
  modified_base 21: mod_base = OTHER; note = 2'O-methyl guanosine phosphorothioate
  modified_base 22: mod_base = OTHER; note = 2'O-methyl uridine phosphorothioate
  modified_base 23: mod_base = OTHER; note = 2'O-methyl uridine
acacggtgatggttgttttggtt

SEQ ID NO: 2028 - RNA, 23 nt, synthetic construct
  source 1..23: mol_type = other RNA
  modified_base 1: mod_base = OTHER; note = 2'O-methyl uridine phosphorothioate
  modified_base 2: mod_base = OTHER; note = 2'-fluoro uridine phosphorothioate
  modified_base 3: mod_base = OTHER; note = 2'O-methyl guanosine
  modified_base 4: mod_base = OTHER; note = 2'O-methyl adenosine
  modified_base 5: mod_base = OTHER; note = 2'O-methyl cytidine
  modified_base 6: mod_base = OTHER; note = 2'-fluoro uridine
  modified_base 7: mod_base = OTHER; note = 2'O-methyl uridine
  modified_base 8: mod_base = OTHER; note = 2'O-methyl uridine
  modified_base 9: mod_base = OTHER; note = 2'O-methyl adenosine
  modified_base 10: mod_base = OTHER; note = 2'O-methyl guanosine
  modified_base 11: mod_base = OTHER; note = 2'O-methyl guanosine
  modified_base 12: mod_base = OTHER; note = 2'O-methyl guanosine
  modified_base 13: mod_base = OTHER; note = 2'O-methyl cytidine
  modified_base 14: mod_base = OTHER; note = 2'-fluoro adenosine
  modified_base 15: mod_base = OTHER; note = 2'O-methyl guanosine
  modified_base 16: mod_base = OTHER; note = 2'-fluoro adenosine
  modified_base 17: mod_base = OTHER; note = 2'O-methyl uridine
  modified_base 18: mod_base = OTHER; note = 2'O-methyl guanosine
  modified_base 19: mod_base = OTHER; note = 2'O-methyl uridine
  modified_base 20: mod_base = OTHER; note = 2'O-methyl cytidine
  modified_base 21: mod_base = OTHER; note = 2'O-methyl guanosine phosphorothioate
  modified_base 22: mod_base = OTHER; note = 2'O-methyl uridine phosphorothioate
  modified_base 23: mod_base = OTHER; note = 2'O-methyl uridine
ttgactttagggcagatgtcgtt

SEQ ID NO: 2029 - RNA, 23 nt, synthetic construct
  source 1..23: mol_type = other RNA
  modified_base 1: mod_base = OTHER; note = 2'O-methyl guanosine phosphorothioate
  modified_base 2: mod_base = OTHER; note = 2'-fluoro cytidine phosphorothioate
  modified_base 3: mod_base = OTHER; note = 2'O-methyl guanosine
  modified_base 4: mod_base = OTHER; note = 2'O-methyl uridine
  modified_base 5: mod_base = OTHER; note = 2'O-methyl adenosine
  modified_base 6: mod_base = OTHER; note = 2'-fluoro guanosine
  modified_base 7: mod_base = OTHER; note = 2'O-methyl adenosine
  modified_base 8: mod_base = OTHER; note = 2'O-methyl cytidine
  modified_base 9: mod_base = OTHER; note = 2'O-methyl uridine
  modified_base 10: mod_base = OTHER; note = 2'O-methyl guanosine
  modified_base 11: mod_base = OTHER; note = 2'O-methyl adenosine
  modified_base 12: mod_base = OTHER; note = 2'O-methyl guanosine
  modified_base 13: mod_base = OTHER; note = 2'O-methyl cytidine
  modified_base 14: mod_base = OTHER; note = 2'-fluoro uridine
  modified_base 15: mod_base = OTHER; note = 2'O-methyl uridine
  modified_base 16: mod_base = OTHER; note = 2'-fluoro guanosine
  modified_base 17: mod_base = OTHER; note = 2'O-methyl guanosine
  modified_base 18: mod_base = OTHER; note = 2'O-methyl uridine
  modified_base 19: mod_base = OTHER; note = 2'O-methyl guanosine
  modified_base 20: mod_base = OTHER; note = 2'O-methyl adenosine
  modified_base 21: mod_base = OTHER; note = 2'O-methyl uridine phosphorothioate
  modified_base 22: mod_base = OTHER; note = 2'O-methyl uridine phosphorothioate
  modified_base 23: mod_base = OTHER; note = 2'O-methyl uridine
gcgtagactgagcttggtgattt

SEQ ID NO: 2030 - RNA, 23 nt, synthetic construct
  source 1..23: mol_type = other RNA
  modified_base 1: mod_base = OTHER; note = 2'O-methyl adenosine phosphorothioate
  modified_base 2: mod_base = OTHER; note = 2'-fluoro uridine phosphorothioate
  modified_base 3: mod_base = OTHER; note = 2'O-methyl adenosine
  modified_base 4: mod_base = OTHER; note = 2'O-methyl adenosine
  modified_base 5: mod_base = OTHER; note = 2'O-methyl guanosine
  modified_base 6: mod_base = OTHER; note = 2'-fluoro adenosine
  modified_base 7: mod_base = OTHER; note = 2'O-methyl cytidine
  modified_base 8: mod_base = OTHER; note = 2'O-methyl adenosine
  modified_base 9: mod_base = OTHER; note = 2'O-methyl uridine
  modified_base 10: mod_base = OTHER; note = 2'O-methyl uridine
  modified_base 11: mod_base = OTHER; note = 2'O-methyl adenosine
  modified_base 12: mod_base = OTHER; note = 2'O-methyl uridine
  modified_base 13: mod_base = OTHER; note = 2'O-methyl cytidine
  modified_base 14: mod_base = OTHER; note = 2'-fluoro cytidine
  modified_base 15: mod_base = OTHER; note = 2'O-methyl uridine
  modified_base 16: mod_base = OTHER; note = 2'-fluoro adenosine
  modified_base 17: mod_base = OTHER; note = 2'O-methyl adenosine
  modified_base 18: mod_base = OTHER; note = 2'O-methyl uridine
  modified_base 19: mod_base = OTHER; note = 2'O-methyl guanosine
  modified_base 20: mod_base = OTHER; note = 2'O-methyl guanosine
  modified_base 21: mod_base = OTHER; note = 2'O-methyl guanosine phosphorothioate
  modified_base 22: mod_base = OTHER; note = 2'O-methyl uridine phosphorothioate
  modified_base 23: mod_base = OTHER; note = 2'O-methyl uridine
ataagacattatcctaatgggtt

SEQ ID NO: 2031 - RNA, 23 nt, synthetic construct
  source 1..23: mol_type = other RNA
  modified_base 1: mod_base = OTHER; note = 5' vinyl phosphonate 2'O-methyl uridine phosphorothioate
  modified_base 2: mod_base = OTHER; note = 2'-fluoro cytidine phosphorothioate
  modified_base 3: mod_base = OTHER; note = 2'O-methyl cytidine
  modified_base 4: mod_base = OTHER; note = 2'O-methyl cytidine
  modified_base 5: mod_base = OTHER; note = 2'O-methyl cytidine
  modified_base 6: mod_base = OTHER; note = 2'-fluoro adenosine
  modified_base 7: mod_base = OTHER; note = 2'O-methyl uridine
  modified_base 8: mod_base = OTHER; note = 2'O-methyl cytidine
  modified_base 9: mod_base = OTHER; note = 2'O-methyl adenosine
  modified_base 10: mod_base = OTHER; note = 2'O-methyl guanosine
  modified_base 11: mod_base = OTHER; note = 2'O-methyl adenosine
  modified_base 12: mod_base = OTHER; note = 2'O-methyl cytidine
  modified_base 13: mod_base = OTHER; note = 2'O-methyl adenosine
  modified_base 14: mod_base = OTHER; note = 2'-fluoro cytidine
  modified_base 15: mod_base = OTHER; note = 2'O-methyl uridine
  modified_base 16: mod_base = OTHER; note = 2'-fluoro cytidine
  modified_base 17: mod_base = OTHER; note = 2'O-methyl uridine
  modified_base 18: mod_base = OTHER; note = 2'O-methyl guanosine
  modified_base 19: mod_base = OTHER; note = 2'O-methyl guanosine
  modified_base 20: mod_base = OTHER; note = 2'O-methyl uridine
  modified_base 21: mod_base = OTHER; note = 2'O-methyl adenosine phosphorothioate
  modified_base 22: mod_base = OTHER; note = 2'O-methyl uridine phosphorothioate
  modified_base 23: mod_base = OTHER; note = 2'O-methyl uridine
tccccatcagacactctggtatt

SEQ ID NO: 2032 - RNA, 23 nt, synthetic construct
  source 1..23: mol_type = other RNA
  modified_base 1: mod_base = OTHER; note = 5' vinyl phosphonate 2'O-methyl uridine phosphorothioate
  modified_base 2: mod_base = OTHER; note = 2'-fluoro uridine phosphorothioate
  modified_base 3: mod_base = OTHER; note = 2'O-methyl uridine
  modified_base 4: mod_base = OTHER; note = 2'O-methyl guanosine
  modified_base 5: mod_base = OTHER; note = 2'O-methyl guanosine
  modified_base 6: mod_base = OTHER; note = 2'-fluoro adenosine
  modified_base 7: mod_base = OTHER; note = 2'O-methyl cytidine
  modified_base 8: mod_base = OTHER; note = 2'O-methyl cytidine
  modified_base 9: mod_base = OTHER; note = 2'O-methyl guanosine
  modified_base 10: mod_base = OTHER; note = 2'O-methyl adenosine
  modified_base 11: mod_base = OTHER; note = 2'O-methyl adenosine
  modified_base 12: mod_base = OTHER; note = 2'O-methyl adenosine
  modified_base 13: mod_base = OTHER; note = 2'O-methyl guanosine
  modified_base 14: mod_base = OTHER; note = 2'-fluoro uridine
  modified_base 15: mod_base = OTHER; note = 2'O-methyl cytidine
  modified_base 16: mod_base = OTHER; note = 2'-fluoro adenosine
  modified_base 17: mod_base = OTHER; note = 2'O-methyl guanosine
  modified_base 18: mod_base = OTHER; note = 2'O-methyl adenosine
  modified_base 19: mod_base = OTHER; note = 2'O-methyl cytidine
  modified_base 20: mod_base = OTHER; note = 2'O-methyl adenosine
  modified_base 21: mod_base = OTHER; note = 2'O-methyl cytidine phosphorothioate
  modified_base 22: mod_base = OTHER; note = 2'O-methyl uridine phosphorothioate
  modified_base 23: mod_base = OTHER; note = 2'O-methyl uridine
tttggaccgaaagtcagacactt

SEQ ID NO: 2033 - RNA, 23 nt, synthetic construct
  source 1..23: mol_type = other RNA
  modified_base 1: mod_base = OTHER; note = 5' vinyl phosphonate 2'O-methyl adenosine phosphorothioate
  modified_base 2: mod_base = OTHER; note = 2'-fluoro uridine phosphorothioate
  modified_base 3: mod_base = OTHER; note = 2'O-methyl cytidine
  modified_base 4: mod_base = OTHER; note = 2'O-methyl cytidine
  modified_base 5: mod_base = OTHER; note = 2'O-methyl adenosine
  modified_base 6: mod_base = OTHER; note = 2'-fluoro cytidine
  modified_base 7: mod_base = OTHER; note = 2'O-methyl guanosine
  modified_base 8: mod_base = OTHER; note = 2'O-methyl adenosine
  modified_base 9: mod_base = OTHER; note = 2'O-methyl cytidine
  modified_base 10: mod_base = OTHER; note = 2'O-methyl uridine
  modified_base 11: mod_base = OTHER; note = 2'O-methyl uridine
  modified_base 12: mod_base = OTHER; note = 2'O-methyl cytidine
  modified_base 13: mod_base = OTHER; note = 2'O-methyl guanosine
  modified_base 14: mod_base = OTHER; note = 2'-fluoro uridine
  modified_base 15: mod_base = OTHER; note = 2'O-methyl cytidine
  modified_base 16: mod_base = OTHER; note = 2'-fluoro uridine
  modified_base 17: mod_base = OTHER; note = 2'O-methyl uridine
  modified_base 18: mod_base = OTHER; note = 2'O-methyl uridine
  modified_base 19: mod_base = OTHER; note = 2'O-methyl guanosine
  modified_base 20: mod_base = OTHER; note = 2'O-methyl guanosine
  modified_base 21: mod_base = OTHER; note = 2'O-methyl adenosine phosphorothioate
  modified_base 22: mod_base = OTHER; note = 2'O-methyl uridine phosphorothioate
  modified_base 23: mod_base = OTHER; note = 2'O-methyl uridine
atccacgacttcgtctttggatt

SEQ ID NO: 2034 - RNA, 23 nt, synthetic construct
  source 1..23: mol_type = other RNA
  modified_base 1: mod_base = OTHER; note = 5' vinyl phosphonate 2'O-methyl uridine phosphorothioate
  modified_base 2: mod_base = OTHER; note = 2'-fluoro adenosine phosphorothioate
  modified_base 3: mod_base = OTHER; note = 2'O-methyl cytidine
  modified_base 4: mod_base = OTHER; note = 2'O-methyl cytidine
  modified_base 5: mod_base = OTHER; note = 2'O-methyl adenosine
  modified_base 6: mod_base = OTHER; note = 2'-fluoro adenosine
  modified_base 7: mod_base = OTHER; note = 2'O-methyl guanosine
  modified_base 8: mod_base = OTHER; note = 2'O-methyl guanosine
  modified_base 9: mod_base = OTHER; note = 2'O-methyl cytidine
  modified_base 10: mod_base = OTHER; note = 2'O-methyl adenosine
  modified_base 11: mod_base = OTHER; note = 2'O-methyl uridine
  modified_base 12: mod_base = OTHER; note = 2'O-methyl cytidine
  modified_base 13: mod_base = OTHER; note = 2'O-methyl cytidine
  modified_base 14: mod_base = OTHER; note = 2'-fluoro adenosine
  modified_base 15: mod_base = OTHER; note = 2'O-methyl cytidine
  modified_base 16: mod_base = OTHER; note = 2'-fluoro guanosine
  modified_base 17: mod_base = OTHER; note = 2'O-methyl adenosine
  modified_base 18: mod_base = OTHER; note = 2'O-methyl cytidine
  modified_base 19: mod_base = OTHER; note = 2'O-methyl uridine
  modified_base 20: mod_base = OTHER; note = 2'O-methyl uridine
  modified_base 21: mod_base = OTHER; note = 2'O-methyl cytidine phosphorothioate
  modified_base 22: mod_base = OTHER; note = 2'O-methyl uridine phosphorothioate
  modified_base 23: mod_base = OTHER; note = 2'O-methyl uridine
taccaaggcatccacgacttctt

SEQ ID NO: 2035 - RNA, 23 nt, synthetic construct
  source 1..23: mol_type = other RNA
  modified_base 1: mod_base = OTHER; note = 5' vinyl phosphonate 2'O-methyl adenosine phosphorothioate
  modified_base 2: mod_base = OTHER; note = 2'-fluoro cytidine phosphorothioate
  modified_base 3: mod_base = OTHER; note = 2'O-methyl adenosine
  modified_base 4: mod_base = OTHER; note = 2'O-methyl uridine
  modified_base 5: mod_base = OTHER; note = 2'O-methyl adenosine
  modified_base 6: mod_base = OTHER; note = 2'-fluoro cytidine
  modified_base 7: mod_base = OTHER; note = 2'O-methyl cytidine
  modified_base 8: mod_base = OTHER; note = 2'O-methyl adenosine
  modified_base 9: mod_base = OTHER; note = 2'O-methyl adenosine
  modified_base 10: mod_base = OTHER; note = 2'O-methyl guanosine
  modified_base 11: mod_base = OTHER; note = 2'O-methyl guanosine
  modified_base 12: mod_base = OTHER; note = 2'O-methyl cytidine
  modified_base 13: mod_base = OTHER; note = 2'O-methyl adenosine
  modified_base 14: mod_base = OTHER; note = 2'-fluoro uridine
  modified_base 15: mod_base = OTHER; note = 2'O-methyl cytidine
  modified_base 16: mod_base = OTHER; note = 2'-fluoro cytidine
  modified_base 17: mod_base = OTHER; note = 2'O-methyl adenosine
  modified_base 18: mod_base = OTHER; note = 2'O-methyl cytidine
  modified_base 19: mod_base = OTHER; note = 2'O-methyl guanosine
  modified_base 20: mod_base = OTHER; note = 2'O-methyl adenosine
  modified_base 21: mod_base = OTHER; note = 2'O-methyl cytidine phosphorothioate
  modified_base 22: mod_base = OTHER; note = 2'O-methyl uridine phosphorothioate
  modified_base 23: mod_base = OTHER; note = 2'O-methyl uridine
acataccaaggcatccacgactt

SEQ ID NO: 2036 - RNA, 23 nt, synthetic construct
  source 1..23: mol_type = other RNA
  modified_base 1: mod_base = OTHER; note = 5' vinyl phosphonate 2'O-methyl adenosine phosphorothioate
  modified_base 2: mod_base = OTHER; note = 2'-fluoro adenosine phosphorothioate
  modified_base 3: mod_base = OTHER; note = 2'O-methyl cytidine
  modified_base 4: mod_base = OTHER; note = 2'O-methyl adenosine
  modified_base 5: mod_base = OTHER; note = 2'O-methyl uridine
  modified_base 6: mod_base = OTHER; note = 2'-fluoro adenosine
  modified_base 7: mod_base = OTHER; note = 2'O-methyl cytidine
  modified_base 8: mod_base = OTHER; note = 2'O-methyl cytidine
  modified_base 9: mod_base = OTHER; note = 2'O-methyl adenosine
  modified_base 10: mod_base = OTHER; note = 2'O-methyl adenosine
  modified_base 11: mod_base = OTHER; note = 2'O-methyl guanosine
  modified_base 12: mod_base = OTHER; note = 2'O-methyl guanosine
  modified_base 13: mod_base = OTHER; note = 2'O-methyl cytidine
  modified_base 14: mod_base = OTHER; note = 2'-fluoro adenosine
  modified_base 15: mod_base = OTHER; note = 2'O-methyl uridine
  modified_base 16: mod_base = OTHER; note = 2'-fluoro cytidine
  modified_base 17: mod_base = OTHER; note = 2'O-methyl cytidine
  modified_base 18: mod_base = OTHER; note = 2'O-methyl adenosine
  modified_base 19: mod_base = OTHER; note = 2'O-methyl cytidine
  modified_base 20: mod_base = OTHER; note = 2'O-methyl guanosine
  modified_base 21: mod_base = OTHER; note = 2'O-methyl adenosine phosphorothioate
  modified_base 22: mod_base = OTHER; note = 2'O-methyl uridine phosphorothioate
  modified_base 23: mod_base = OTHER; note = 2'O-methyl uridine
aacataccaaggcatccacgatt

SEQ ID NO: 2037 - RNA, 23 nt, synthetic construct
  source 1..23: mol_type = other RNA
  modified_base 1: mod_base = OTHER; note = 5' vinyl phosphonate 2'O-methyl guanosine phosphorothioate
  modified_base 2: mod_base = OTHER; note = 2'-fluoro adenosine phosphorothioate
  modified_base 3: mod_base = OTHER; note = 2'O-methyl adenosine
  modified_base 4: mod_base = OTHER; note = 2'O-methyl guanosine
  modified_base 5: mod_base = OTHER; note = 2'O-methyl cytidine
  modified_base 6: mod_base = OTHER; note = 2'-fluoro adenosine
  modified_base 7: mod_base = OTHER; note = 2'O-methyl guanosine
  modified_base 8: mod_base = OTHER; note = 2'O-methyl guanosine
  modified_base 9: mod_base = OTHER; note = 2'O-methyl adenosine
  modified_base 10: mod_base = OTHER; note = 2'O-methyl adenosine
  modified_base 11: mod_base = OTHER; note = 2'O-methyl cytidine
  modified_base 12: mod_base = OTHER; note = 2'O-methyl adenosine
  modified_base 13: mod_base = OTHER; note = 2'O-methyl uridine
  modified_base 14: mod_base = OTHER; note = 2'-fluoro adenosine
  modified_base 15: mod_base = OTHER; note = 2'O-methyl cytidine
  modified_base 16: mod_base = OTHER; note = 2'-fluoro cytidine
  modified_base 17: mod_base = OTHER; note = 2'O-methyl adenosine
  modified_base 18: mod_base = OTHER; note = 2'O-methyl adenosine
  modified_base 19: mod_base = OTHER; note = 2'O-methyl guanosine
  modified_base 20: mod_base = OTHER; note = 2'O-methyl guanosine
  modified_base 21: mod_base = OTHER; note = 2'O-methyl cytidine phosphorothioate
  modified_base 22: mod_base = OTHER; note = 2'O-methyl uridine phosphorothioate
  modified_base 23: mod_base = OTHER; note = 2'O-methyl uridine
gaagcaggaacataccaaggctt

SEQ ID NO: 2038 - RNA, 23 nt, synthetic construct
  source 1..23: mol_type = other RNA
  modified_base 1: mod_base = OTHER; note = 5' vinyl phosphonate 2'O-methyl cytidine phosphorothioate
  modified_base 2: mod_base = OTHER; note = 2'-fluoro guanosine phosphorothioate
  modified_base 3: mod_base = OTHER; note = 2'O-methyl guanosine
  modified_base 4: mod_base = OTHER; note = 2'O-methyl uridine
  modified_base 5: mod_base = OTHER; note = 2'O-methyl guanosine
  modified_base 6: mod_base = OTHER; note = 2'-fluoro adenosine
  modified_base 7: mod_base = OTHER; note = 2'O-methyl uridine
  modified_base 8: mod_base = OTHER; note = 2'O-methyl guanosine
  modified_base 9: mod_base = OTHER; note = 2'O-methyl guanosine
  modified_base 10: mod_base = OTHER; note = 2'O-methyl uridine
  modified_base 11: mod_base = OTHER; note = 2'O-methyl uridine
  modified_base 12: mod_base = OTHER; note = 2'O-methyl guanosine
  modified_base 13: mod_base = OTHER; note = 2'O-methyl uridine
  modified_base 14: mod_base = OTHER; note = 2'-fluoro uridine
  modified_base 15: mod_base = OTHER; note = 2'O-methyl uridine
  modified_base 16: mod_base = OTHER; note = 2'-fluoro uridine
  modified_base 17: mod_base = OTHER; note = 2'O-methyl guanosine
  modified_base 18: mod_base = OTHER; note = 2'O-methyl guanosine
  modified_base 19: mod_base = OTHER; note = 2'O-methyl cytidine
  modified_base 20: mod_base = OTHER; note = 2'O-methyl adenosine
  modified_base 21: mod_base = OTHER; note = 2'O-methyl uridine phosphorothioate
  modified_base 22: mod_base = OTHER; note = 2'O-methyl uridine phosphorothioate
  modified_base 23: mod_base = OTHER; note = 2'O-methyl uridine
cggtgatggttgttttggcattt

SEQ ID NO: 2039 - RNA, 23 nt, synthetic construct
  source 1..23: mol_type = other RNA
  modified_base 1: mod_base = OTHER; note = 5' vinyl phosphonate 2'O-methyl adenosine phosphorothioate
  modified_base 2: mod_base = OTHER; note = 2'-fluoro cytidine phosphorothioate
  modified_base 3: mod_base = OTHER; note = 2'O-methyl adenosine
  modified_base 4: mod_base = OTHER; note = 2'O-methyl cytidine
  modified_base 5: mod_base = OTHER; note = 2'O-methyl guanosine
  modified_base 6: mod_base = OTHER; note = 2'-fluoro guanosine
  modified_base 7: mod_base = OTHER; note = 2'O-methyl uridine
  modified_base 8: mod_base = OTHER; note = 2'O-methyl guanosine
  modified_base 9: mod_base = OTHER; note = 2'O-methyl adenosine
  modified_base 10: mod_base = OTHER; note = 2'O-methyl uridine
  modified_base 11: mod_base = OTHER; note = 2'O-methyl guanosine
  modified_base 12: mod_base = OTHER; note = 2'O-methyl guanosine
  modified_base 13: mod_base = OTHER; note = 2'O-methyl uridine
  modified_base 14: mod_base = OTHER; note = 2'-fluoro uridine
  modified_base 15: mod_base = OTHER; note = 2'O-methyl guanosine
  modified_base 16: mod_base = OTHER; note = 2'-fluoro uridine
  modified_base 17: mod_base = OTHER; note = 2'O-methyl uridine
  modified_base 18: mod_base = OTHER; note = 2'O-methyl uridine
  modified_base 19: mod_base = OTHER; note = 2'O-methyl uridine
  modified_base 20: mod_base = OTHER; note = 2'O-methyl guanosine
  modified_base 21: mod_base = OTHER; note = 2'O-methyl guanosine phosphorothioate
  modified_base 22: mod_base = OTHER; note = 2'O-methyl uridine phosphorothioate
  modified_base 23: mod_base = OTHER; note = 2'O-methyl uridine
acacggtgatggttgttttggtt

SEQ ID NO: 2040 - RNA, 23 nt, synthetic construct
  source 1..23: mol_type = other RNA
  modified_base 1: mod_base = OTHER; note = 5' vinyl phosphonate 2'O-methyl uridine phosphorothioate
  modified_base 2: mod_base = OTHER; note = 2'-fluoro uridine phosphorothioate
  modified_base 3: mod_base = OTHER; note = 2'O-methyl guanosine
  modified_base 4: mod_base = OTHER; note = 2'O-methyl adenosine
  modified_base 5: mod_base = OTHER; note = 2'O-methyl cytidine
  modified_base 6: mod_base = OTHER; note = 2'-fluoro uridine
  modified_base 7: mod_base = OTHER; note = 2'O-methyl uridine
  modified_base 8: mod_base = OTHER; note = 2'O-methyl uridine
  modified_base 9: mod_base = OTHER; note = 2'O-methyl adenosine
  modified_base 10: mod_base = OTHER; note = 2'O-methyl guanosine
  modified_base 11: mod_base = OTHER; note = 2'O-methyl guanosine
  modified_base 12: mod_base = OTHER; note = 2'O-methyl guanosine
  modified_base 13: mod_base = OTHER; note = 2'O-methyl cytidine
  modified_base 14: mod_base = OTHER; note = 2'-fluoro adenosine
  modified_base 15: mod_base = OTHER; note = 2'O-methyl guanosine
  modified_base 16: mod_base = OTHER; note = 2'-fluoro adenosine
  modified_base 17: mod_base = OTHER; note = 2'O-methyl uridine
  modified_base 18: mod_base = OTHER; note = 2'O-methyl guanosine
  modified_base 19: mod_base = OTHER; note = 2'O-methyl uridine
  modified_base 20: mod_base = OTHER; note = 2'O-methyl cytidine
  modified_base 21: mod_base = OTHER; note = 2'O-methyl guanosine phosphorothioate
  modified_base 22: mod_base = OTHER; note = 2'O-methyl uridine phosphorothioate
  modified_base 23: mod_base = OTHER; note = 2'O-methyl uridine
ttgactttagggcagatgtcgtt

SEQ ID NO: 2041 - RNA, 23 nt, synthetic construct
  source 1..23: mol_type = other RNA
  modified_base 1: mod_base = OTHER; note = 5' vinyl phosphonate 2'O-methyl guanosine phosphorothioate
  modified_base 2: mod_base = OTHER; note = 2'-fluoro cytidine phosphorothioate
  modified_base 3: mod_base = OTHER; note = 2'O-methyl guanosine
  modified_base 4: mod_base = OTHER; note = 2'O-methyl uridine
  modified_base 5: mod_base = OTHER; note = 2'O-methyl adenosine
  modified_base 6: mod_base = OTHER; note = 2'-fluoro guanosine
  modified_base 7: mod_base = OTHER; note = 2'O-methyl adenosine
  modified_base 8: mod_base = OTHER; note = 2'O-methyl cytidine
  modified_base 9: mod_base = OTHER; note = 2'O-methyl uridine
  modified_base 10: mod_base = OTHER; note = 2'O-methyl guanosine
  modified_base 11: mod_base = OTHER; note = 2'O-methyl adenosine
  modified_base 12: mod_base = OTHER; note = 2'O-methyl guanosine
  modified_base 13: mod_base = OTHER; note = 2'O-methyl cytidine
  modified_base 14: mod_base = OTHER; note = 2'-fluoro uridine
  modified_base 15: mod_base = OTHER; note = 2'O-methyl uridine
  modified_base 16: mod_base = OTHER; note = 2'-fluoro guanosine
  modified_base 17: mod_base = OTHER; note = 2'O-methyl guanosine
  modified_base 18: mod_base = OTHER; note = 2'O-methyl uridine
  modified_base 19: mod_base = OTHER; note = 2'O-methyl guanosine
  modified_base 20: mod_base = OTHER; note = 2'O-methyl adenosine
  modified_base 21: mod_base = OTHER; note = 2'O-methyl uridine phosphorothioate
  modified_base 22: mod_base = OTHER; note = 2'O-methyl uridine phosphorothioate
  modified_base 23: mod_base = OTHER; note = 2'O-methyl uridine
gcgtagactgagcttggtgattt

SEQ ID NO: 2042 - RNA, 23 nt, synthetic construct
  source 1..23: mol_type = other RNA
  modified_base 1: mod_base = OTHER; note = 5' vinyl phosphonate 2'O-methyl adenosine phosphorothioate
  modified_base 2: mod_base = OTHER; note = 2'-fluoro uridine phosphorothioate
  modified_base 3: mod_base = OTHER; note = 2'O-methyl adenosine
  modified_base 4: mod_base = OTHER; note = 2'O-methyl adenosine
  modified_base 5: mod_base = OTHER; note = 2'O-methyl guanosine
  modified_base 6: mod_base = OTHER; note = 2'-fluoro adenosine
  modified_base 7: mod_base = OTHER; note = 2'O-methyl cytidine
  modified_base 8: mod_base = OTHER; note = 2'O-methyl adenosine
  modified_base 9: mod_base = OTHER; note = 2'O-methyl uridine
  modified_base 10: mod_base = OTHER; note = 2'O-methyl uridine
  modified_base 11: mod_base = OTHER; note = 2'O-methyl adenosine
  modified_base 12: mod_base = OTHER; note = 2'O-methyl uridine
  modified_base 13: mod_base = OTHER; note = 2'O-methyl cytidine
  modified_base 14: mod_base = OTHER; note = 2'-fluoro cytidine
  modified_base 15: mod_base = OTHER; note = 2'O-methyl uridine
  modified_base 16: mod_base = OTHER; note = 2'-fluoro adenosine
  modified_base 17: mod_base = OTHER; note = 2'O-methyl adenosine
  modified_base 18: mod_base = OTHER; note = 2'O-methyl uridine
  modified_base 19: mod_base = OTHER; note = 2'O-methyl guanosine
  modified_base 20: mod_base = OTHER; note = 2'O-methyl guanosine
  modified_base 21: mod_base = OTHER; note = 2'O-methyl guanosine phosphorothioate
  modified_base 22: mod_base = OTHER; note = 2'O-methyl uridine phosphorothioate
  modified_base 23: mod_base = OTHER; note = 2'O-methyl uridine
ataagacattatcctaatgggtt

SEQ ID NO: 2043 - RNA, 23 nt, synthetic construct
  source 1..23: mol_type = other RNA
  modified_base 1: mod_base = OTHER; note = 2'O-methyl uridine phosphorothioate
  modified_base 2: mod_base = OTHER; note = 2'-fluoro cytidine phosphorothioate
  modified_base 3: mod_base = OTHER; note = 2'O-methyl cytidine
  modified_base 4: mod_base = OTHER; note = 2'O-methyl cytidine
  modified_base 5: mod_base = OTHER; note = 2'O-methyl cytidine
  modified_base 6: mod_base = OTHER; note = 2'O-methyl adenosine
  modified_base 7: mod_base = OTHER; note = 2'O-methyl uridine
  modified_base 8: mod_base = OTHER; note = 2'O-methyl cytidine
  modified_base 9: mod_base = OTHER; note = 2'O-methyl adenosine
  modified_base 10: mod_base = OTHER; note = 2'O-methyl guanosine
  modified_base 11: mod_base = OTHER; note = 2'O-methyl adenosine
  modified_base 12: mod_base = OTHER; note = 2'O-methyl cytidine
  modified_base 13: mod_base = OTHER; note = 2'O-methyl adenosine
  modified_base 14: mod_base = OTHER; note = 2'-fluoro cytidine
  modified_base 15: mod_base = OTHER; note = 2'O-methyl uridine
  modified_base 16: mod_base = OTHER; note = 2'O-methyl cytidine
  modified_base 17: mod_base = OTHER; note = 2'O-methyl uridine
  modified_base 18: mod_base = OTHER; note = 2'O-methyl guanosine
  modified_base 19: mod_base = OTHER; note = 2'O-methyl guanosine
  modified_base 20: mod_base = OTHER; note = 2'O-methyl uridine
  modified_base 21: mod_base = OTHER; note = 2'O-methyl adenosine phosphorothioate
  modified_base 22: mod_base = OTHER; note = 2'O-methyl uridine phosphorothioate
  modified_base 23: mod_base = OTHER; note = 2'O-methyl uridine
tccccatcagacactctggtatt

SEQ ID NO: 2044 - RNA, 23 nt, synthetic construct
  source 1..23: mol_type = other RNA
  modified_base 1: mod_base = OTHER; note = 2'O-methyl uridine phosphorothioate
  modified_base 2: mod_base = OTHER; note = 2'-fluoro uridine phosphorothioate
  modified_base 3: mod_base = OTHER; note = 2'O-methyl uridine
  modified_base 4: mod_base = OTHER; note = 2'O-methyl guanosine
  modified_base 5: mod_base = OTHER; note = 2'O-methyl guanosine
  modified_base 6: mod_base = OTHER; note = 2'O-methyl adenosine
  modified_base 7: mod_base = OTHER; note = 2'O-methyl cytidine
  modified_base 8: mod_base = OTHER; note = 2'O-methyl cytidine
  modified_base 9: mod_base = OTHER; note = 2'O-methyl guanosine
  modified_base 10: mod_base = OTHER; note = 2'O-methyl adenosine
  modified_base 11: mod_base = OTHER; note = 2'O-methyl adenosine
  modified_base 12: mod_base = OTHER; note = 2'O-methyl adenosine
  modified_base 13: mod_base = OTHER; note = 2'O-methyl guanosine
  modified_base 14: mod_base = OTHER; note = 2'-fluoro uridine
  modified_base 15: mod_base = OTHER; note = 2'O-methyl cytidine
  modified_base 16: mod_base = OTHER; note = 2'O-methyl adenosine
  modified_base 17: mod_base = OTHER; note = 2'O-methyl guanosine
  modified_base 18: mod_base = OTHER; note = 2'O-methyl adenosine
  modified_base 19: mod_base = OTHER; note = 2'O-methyl cytidine
  modified_base 20: mod_base = OTHER; note = 2'O-methyl adenosine
  modified_base 21: mod_base = OTHER; note = 2'O-methyl cytidine phosphorothioate
  modified_base 22: mod_base = OTHER; note = 2'O-methyl uridine phosphorothioate
  modified_base 23: mod_base = OTHER; note = 2'O-methyl uridine
tttggaccgaaagtcagacactt

SEQ ID NO: 2045 - RNA, 23 nt, synthetic construct
  source 1..23: mol_type = other RNA
  modified_base 1: mod_base = OTHER; note = 2'O-methyl adenosine phosphorothioate
  modified_base 2: mod_base = OTHER; note = 2'-fluoro uridine phosphorothioate
  modified_base 3: mod_base = OTHER; note = 2'O-methyl cytidine
  modified_base 4: mod_base = OTHER; note = 2'O-methyl cytidine
  modified_base 5: mod_base = OTHER; note = 2'O-methyl adenosine
  modified_base 6: mod_base = OTHER; note = 2'O-methyl cytidine
  modified_base 7: mod_base = OTHER; note = 2'O-methyl guanosine
  modified_base 8: mod_base = OTHER; note = 2'O-methyl adenosine
  modified_base 9: mod_base = OTHER; note = 2'O-methyl cytidine
  modified_base 10: mod_base = OTHER; note = 2'O-methyl uridine
  modified_base 11: mod_base = OTHER; note = 2'O-methyl uridine
  modified_base 12: mod_base = OTHER; note = 2'O-methyl cytidine
  modified_base 13: mod_base = OTHER; note = 2'O-methyl guanosine
  modified_base 14: mod_base = OTHER; note = 2'-fluoro uridine
  modified_base 15: mod_base = OTHER; note = 2'O-methyl cytidine
  modified_base 16: mod_base = OTHER; note = 2'O-methyl uridine
  modified_base 17: mod_base = OTHER; note = 2'O-methyl uridine
  modified_base 18: mod_base = OTHER; note = 2'O-methyl uridine
  modified_base 19: mod_base = OTHER; note = 2'O-methyl guanosine
  modified_base 20: mod_base = OTHER; note = 2'O-methyl guanosine
  modified_base 21: mod_base = OTHER; note = 2'O-methyl adenosine phosphorothioate
  modified_base 22: mod_base = OTHER; note = 2'O-methyl uridine phosphorothioate
  modified_base 23: mod_base = OTHER; note = 2'O-methyl uridine
atccacgacttcgtctttggatt

SEQ ID NO: 2046 - RNA, 23 nt, synthetic construct
  source 1..23: mol_type = other RNA
  modified_base 1: mod_base = OTHER; note = 2'O-methyl uridine phosphorothioate
  modified_base 2: mod_base = OTHER; note = 2'-fluoro adenosine phosphorothioate
  modified_base 3: mod_base = OTHER; note = 2'O-methyl cytidine
  modified_base 4: mod_base = OTHER; note = 2'O-methyl cytidine
  modified_base 5: mod_base = OTHER; note = 2'O-methyl adenosine
  modified_base 6: mod_base = OTHER; note = 2'O-methyl adenosine
  modified_base 7: mod_base = OTHER; note = 2'O-methyl guanosine
  modified_base 8: mod_base = OTHER; note = 2'O-methyl guanosine
  modified_base 9: mod_base = OTHER; note = 2'O-methyl cytidine
  modified_base 10: mod_base = OTHER; note = 2'O-methyl adenosine
  modified_base 11: mod_base = OTHER; note = 2'O-methyl uridine
  modified_base 12: mod_base = OTHER; note = 2'O-methyl cytidine
  modified_base 13: mod_base = OTHER; note = 2'O-methyl cytidine
  modified_base 14: mod_base = OTHER; note = 2'-fluoro adenosine
  modified_base 15: mod_base = OTHER; note = 2'O-methyl cytidine
  modified_base 16: mod_base = OTHER; note = 2'O-methyl guanosine
  modified_base 17: mod_base = OTHER; note = 2'O-methyl adenosine
  modified_base 18: mod_base = OTHER; note = 2'O-methyl cytidine
  modified_base 19: mod_base = OTHER; note = 2'O-methyl uridine
  modified_base 20: mod_base = OTHER; note = 2'O-methyl uridine
  modified_base 21: mod_base = OTHER; note = 2'O-methyl cytidine phosphorothioate
  modified_base 22: mod_base = OTHER; note = 2'O-methyl uridine phosphorothioate
  modified_base 23: mod_base = OTHER; note = 2'O-methyl uridine
taccaaggcatccacgacttctt

SEQ ID NO: 2047 - RNA, 23 nt, synthetic construct
  source 1..23: mol_type = other RNA
  modified_base 1: mod_base = OTHER; note = 2'O-methyl adenosine phosphorothioate
  modified_base 2: mod_base = OTHER; note = 2'-fluoro cytidine phosphorothioate
  modified_base 3: mod_base = OTHER; note = 2'O-methyl adenosine
  modified_base 4: mod_base = OTHER; note = 2'O-methyl uridine
  modified_base 5: mod_base = OTHER; note = 2'O-methyl adenosine
  modified_base 6: mod_base = OTHER; note = 2'O-methyl cytidine
  modified_base 7: mod_base = OTHER; note = 2'O-methyl cytidine
  modified_base 8: mod_base = OTHER; note = 2'O-methyl adenosine
  modified_base 9: mod_base = OTHER; note = 2'O-methyl adenosine
  modified_base 10: mod_base = OTHER; note = 2'O-methyl guanosine
  modified_base 11: mod_base = OTHER; note = 2'O-methyl guanosine
  modified_base 12: mod_base = OTHER; note = 2'O-methyl cytidine
  modified_base 13: mod_base = OTHER; note = 2'O-methyl adenosine
  modified_base 14: mod_base = OTHER; note = 2'-fluoro uridine
  modified_base 15: mod_base = OTHER; note = 2'O-methyl cytidine
  modified_base 16: mod_base = OTHER; note = 2'O-methyl cytidine
  modified_base 17: mod_base = OTHER; note = 2'O-methyl adenosine
  modified_base 18: mod_base = OTHER; note = 2'O-methyl cytidine
  modified_base 19: mod_base = OTHER; note = 2'O-methyl guanosine
  modified_base 20: mod_base = OTHER; note = 2'O-methyl adenosine
  modified_base 21: mod_base = OTHER; note = 2'O-methyl cytidine phosphorothioate
  modified_base 22: mod_base = OTHER; note = 2'O-methyl uridine phosphorothioate
  modified_base 23: mod_base = OTHER; note = 2'O-methyl uridine
acataccaaggcatccacgactt

SEQ ID NO: 2048 - RNA, 23 nt, synthetic construct
  source 1..23: mol_type = other RNA
  modified_base 1: mod_base = OTHER; note = 2'O-methyl adenosine phosphorothioate
  modified_base 2: mod_base = OTHER; note = 2'-fluoro adenosine phosphorothioate
  modified_base 3: mod_base = OTHER; note = 2'O-methyl cytidine
  modified_base 4: mod_base = OTHER; note = 2'O-methyl adenosine
  modified_base 5: mod_base = OTHER; note = 2'O-methyl uridine
  modified_base 6: mod_base = OTHER; note = 2'O-methyl adenosine
  modified_base 7: mod_base = OTHER; note = 2'O-methyl cytidine
  modified_base 8: mod_base = OTHER; note = 2'O-methyl cytidine
  modified_base 9: mod_base = OTHER; note = 2'O-methyl adenosine
  modified_base 10: mod_base = OTHER; note = 2'O-methyl adenosine
  modified_base 11: mod_base = OTHER; note = 2'O-methyl guanosine
  modified_base 12: mod_base = OTHER; note = 2'O-methyl guanosine
  modified_base 13: mod_base = OTHER; note = 2'O-methyl cytidine
  modified_base 14: mod_base = OTHER; note = 2'-fluoro adenosine
  modified_base 15: mod_base = OTHER; note = 2'O-methyl uridine
  modified_base 16: mod_base = OTHER; note = 2'O-methyl cytidine
  modified_base 17: mod_base = OTHER; note = 2'O-methyl cytidine
  modified_base 18: mod_base = OTHER; note = 2'O-methyl adenosine
  modified_base 19: mod_base = OTHER; note = 2'O-methyl cytidine
  modified_base 20: mod_base = OTHER; note = 2'O-methyl guanosine
  modified_base 21: mod_base = OTHER; note = 2'O-methyl adenosine phosphorothioate
  modified_base 22: mod_base = OTHER; note = 2'O-methyl uridine phosphorothioate
  modified_base 23: mod_base = OTHER; note = 2'O-methyl uridine
aacataccaaggcatccacgatt

SEQ ID NO: 2049 - RNA, 23 nt, synthetic construct
  source 1..23: mol_type = other RNA
  modified_base 1: mod_base = OTHER; note = 2'O-methyl guanosine phosphorothioate
  modified_base 2: mod_base = OTHER; note = 2'-fluoro adenosine phosphorothioate
  modified_base 3: mod_base = OTHER; note = 2'O-methyl adenosine
  modified_base 4: mod_base = OTHER; note = 2'O-methyl guanosine
  modified_base 5: mod_base = OTHER; note = 2'O-methyl cytidine
  modified_base 6: mod_base = OTHER; note = 2'O-methyl adenosine
  modified_base 7: mod_base = OTHER; note = 2'O-methyl guanosine
  modified_base 8: mod_base = OTHER; note = 2'O-methyl guanosine
  modified_base 9: mod_base = OTHER; note = 2'O-methyl adenosine
  modified_base 10: mod_base = OTHER; note = 2'O-methyl adenosine
  modified_base 11: mod_base = OTHER; note = 2'O-methyl cytidine
  modified_base 12: mod_base = OTHER; note = 2'O-methyl adenosine
  modified_base 13: mod_base = OTHER; note = 2'O-methyl uridine
  modified_base 14: mod_base = OTHER; note = 2'-fluoro adenosine
  modified_base 15: mod_base = OTHER; note = 2'O-methyl cytidine
  modified_base 16: mod_base = OTHER; note = 2'O-methyl cytidine
  modified_base 17: mod_base = OTHER; note = 2'O-methyl adenosine
  modified_base 18: mod_base = OTHER; note = 2'O-methyl adenosine
  modified_base 19: mod_base = OTHER; note = 2'O-methyl guanosine
  modified_base 20: mod_base = OTHER; note = 2'O-methyl guanosine
  modified_base 21: mod_base = OTHER; note = 2'O-methyl cytidine phosphorothioate
  modified_base 22: mod_base = OTHER; note = 2'O-methyl uridine phosphorothioate
  modified_base 23: mod_base = OTHER; note = 2'O-methyl uridine
gaagcaggaacataccaaggctt

SEQ ID NO: 2050 - RNA, 23 nt, synthetic construct
  source 1..23: mol_type = other RNA
  modified_base 1: mod_base = OTHER; note = 2'O-methyl cytidine phosphorothioate
  modified_base 2: mod_base = OTHER; note = 2'-fluoro guanosine phosphorothioate
  modified_base 3: mod_base = OTHER; note = 2'O-methyl guanosine
  modified_base 4: mod_base = OTHER; note = 2'O-methyl uridine
  modified_base 5: mod_base = OTHER; note = 2'O-methyl guanosine
  modified_base 6: mod_base = OTHER; note = 2'O-methyl adenosine
  modified_base 7: mod_base = OTHER; note = 2'O-methyl uridine
  modified_base 8: mod_base = OTHER; note = 2'O-methyl guanosine
  modified_base 9: mod_base = OTHER; note = 2'O-methyl guanosine
  modified_base 10: mod_base = OTHER; note = 2'O-methyl uridine
  modified_base 11: mod_base = OTHER; note = 2'O-methyl uridine
  modified_base 12: mod_base = OTHER; note = 2'O-methyl guanosine
  modified_base 13: mod_base = OTHER; note = 2'O-methyl uridine
  modified_base 14: mod_base = OTHER; note = 2'-fluoro uridine
  modified_base 15: mod_base = OTHER; note = 2'O-methyl uridine
  modified_base 16: mod_base = OTHER; note = 2'O-methyl uridine
  modified_base 17: mod_base = OTHER; note = 2'O-methyl guanosine
  modified_base 18: mod_base = OTHER; note = 2'O-methyl guanosine
  modified_base 19: mod_base = OTHER; note = 2'O-methyl cytidine
  modified_base 20: mod_base = OTHER; note = 2'O-methyl adenosine
  modified_base 21: mod_base = OTHER; note = 2'O-methyl uridine phosphorothioate
  modified_base 22: mod_base = OTHER; note = 2'O-methyl uridine phosphorothioate
  modified_base 23: mod_base = OTHER; note = 2'O-methyl uridine
cggtgatggttgttttggcattt

SEQ ID NO: 2051 - RNA, 23 nt, synthetic construct
  source 1..23: mol_type = other RNA
  modified_base 1: mod_base = OTHER; note = 2'O-methyl adenosine phosphorothioate
  modified_base 2: mod_base = OTHER; note = 2'-fluoro cytidine phosphorothioate
  modified_base 3: mod_base = OTHER; note = 2'O-methyl adenosine
  modified_base 4: mod_base = OTHER; note = 2'O-methyl cytidine
  modified_base 5: mod_base = OTHER; note = 2'O-methyl guanosine
  modified_base 6: mod_base = OTHER; note = 2'O-methyl guanosine
  modified_base 7: mod_base = OTHER; note = 2'O-methyl uridine
  modified_base 8: mod_base = OTHER; note = 2'O-methyl guanosine
  modified_base 9: mod_base = OTHER; note = 2'O-methyl adenosine
  modified_base 10: mod_base = OTHER; note = 2'O-methyl uridine
  modified_base 11: mod_base = OTHER; note = 2'O-methyl guanosine
  modified_base 12: mod_base = OTHER; note = 2'O-methyl guanosine
  modified_base 13: mod_base = OTHER; note = 2'O-methyl uridine
  modified_base 14: mod_base = OTHER; note = 2'-fluoro uridine
  modified_base 15: mod_base = OTHER; note = 2'O-methyl guanosine
  modified_base 16: mod_base = OTHER; note = 2'O-methyl uridine
  modified_base 17: mod_base = OTHER; note = 2'O-methyl uridine
  modified_base 18: mod_base = OTHER; note = 2'O-methyl uridine
  modified_base 19: mod_base = OTHER; note = 2'O-methyl uridine
  modified_base 20: mod_base = OTHER; note = 2'O-methyl guanosine
  modified_base 21: mod_base = OTHER; note = 2'O-methyl guanosine phosphorothioate
  modified_base 22: mod_base = OTHER; note = 2'O-methyl uridine phosphorothioate
  modified_base 23: mod_base = OTHER; note = 2'O-methyl uridine
acacggtgatggttgttttggtt

SEQ ID NO: 2052 - RNA, 23 nt, synthetic construct
  source 1..23: mol_type = other RNA
  modified_base 1: mod_base = OTHER; note = 2'O-methyl uridine phosphorothioate
  modified_base 2: mod_base = OTHER; note = 2'-fluoro uridine phosphorothioate
  modified_base 3: mod_base = OTHER; note = 2'O-methyl guanosine
  modified_base 4: mod_base = OTHER; note = 2'O-methyl adenosine
  modified_base 5: mod_base = OTHER; note = 2'O-methyl cytidine
  modified_base 6: mod_base = OTHER; note = 2'O-methyl uridine
  modified_base 7: mod_base = OTHER; note = 2'O-methyl uridine
  modified_base 8: mod_base = OTHER; note = 2'O-methyl uridine
  modified_base 9: mod_base = OTHER; note = 2'O-methyl adenosine
  modified_base 10: mod_base = OTHER; note = 2'O-methyl guanosine
  modified_base 11: mod_base = OTHER; note = 2'O-methyl guanosine
  modified_base 12: mod_base = OTHER; note = 2'O-methyl guanosine
  modified_base 13: mod_base = OTHER; note = 2'O-methyl cytidine
  modified_base 14: mod_base = OTHER; note = 2'-fluoro adenosine
  modified_base 15: mod_base = OTHER; note = 2'O-methyl guanosine
  modified_base 16: mod_base = OTHER; note = 2'O-methyl adenosine
  modified_base 17: mod_base = OTHER; note = 2'O-methyl uridine
  modified_base 18: mod_base = OTHER; note = 2'O-methyl guanosine
  modified_base 19: mod_base = OTHER; note = 2'O-methyl uridine
  modified_base 20: mod_base = OTHER; note = 2'O-methyl cytidine
  modified_base 21: mod_base = OTHER; note = 2'O-methyl guanosine phosphorothioate
  modified_base 22: mod_base = OTHER; note = 2'O-methyl uridine phosphorothioate
  modified_base 23: mod_base = OTHER; note = 2'O-methyl uridine
ttgactttagggcagatgtcgtt

SEQ ID NO: 2053 - RNA, 23 nt, synthetic construct
  source 1..23: mol_type = other RNA
  modified_base 1: mod_base = OTHER; note = 2'O-methyl guanosine phosphorothioate
  modified_base 2: mod_base = OTHER; note = 2'-fluoro cytidine phosphorothioate
  modified_base 3: mod_base = OTHER; note = 2'O-methyl guanosine
  modified_base 4: mod_base = OTHER; note = 2'O-methyl uridine
  modified_base 5: mod_base = OTHER; note = 2'O-methyl adenosine
  modified_base 6: mod_base = OTHER; note = 2'O-methyl guanosine
  modified_base 7: mod_base = OTHER; note = 2'O-methyl adenosine
  modified_base 8: mod_base = OTHER; note = 2'O-methyl cytidine
  modified_base 9: mod_base = OTHER; note = 2'O-methyl uridine
  modified_base 10: mod_base = OTHER; note = 2'O-methyl guanosine
  modified_base 11: mod_base = OTHER; note = 2'O-methyl adenosine
  modified_base 12: mod_base = OTHER; note = 2'O-methyl guanosine
  modified_base 13: mod_base = OTHER; note = 2'O-methyl cytidine
  modified_base 14: mod_base = OTHER; note = 2'-fluoro uridine
  modified_base 15: mod_base = OTHER; note = 2'O-methyl uridine
  modified_base 16: mod_base = OTHER; note = 2'O-methyl guanosine
  modified_base 17: mod_base = OTHER; note = 2'O-methyl guanosine
  modified_base 18: mod_base = OTHER; note = 2'O-methyl uridine
  modified_base 19: mod_base = OTHER; note = 2'O-methyl guanosine
  modified_base 20: mod_base = OTHER; note = 2'O-methyl adenosine
  modified_base 21: mod_base = OTHER; note = 2'O-methyl uridine phosphorothioate
  modified_base 22: mod_base = OTHER; note = 2'O-methyl uridine phosphorothioate
  modified_base 23: mod_base = OTHER; note = 2'O-methyl uridine
gcgtagactgagcttggtgattt

SEQ ID NO: 2054 - RNA, 23 nt, synthetic construct
  source 1..23: mol_type = other RNA
  modified_base 1: mod_base = OTHER; note = 2'O-methyl adenosine phosphorothioate
  modified_base 2: mod_base = OTHER; note = 2'-fluoro uridine phosphorothioate
  modified_base 3: mod_base = OTHER; note = 2'O-methyl adenosine
  modified_base 4: mod_base = OTHER; note = 2'O-methyl adenosine
  modified_base 5: mod_base = OTHER; note = 2'O-methyl guanosine
  modified_base 6: mod_base = OTHER; note = 2'O-methyl adenosine
  modified_base 7: mod_base = OTHER; note = 2'O-methyl cytidine
  modified_base 8: mod_base = OTHER; note = 2'O-methyl adenosine
  modified_base 9: mod_base = OTHER; note = 2'O-methyl uridine
  modified_base 10: mod_base = OTHER; note = 2'O-methyl uridine
  modified_base 11: mod_base = OTHER; note = 2'O-methyl adenosine
  modified_base 12: mod_base = OTHER; note = 2'O-methyl uridine
  modified_base 13: mod_base = OTHER; note = 2'O-methyl cytidine
  modified_base 14: mod_base = OTHER; note = 2'-fluoro cytidine
  modified_base 15: mod_base = OTHER; note = 2'O-methyl uridine
  modified_base 16: mod_base = OTHER; note = 2'O-methyl adenosine
  modified_base 17: mod_base = OTHER; note = 2'O-methyl adenosine
  modified_base 18: mod_base = OTHER; note = 2'O-methyl uridine
  modified_base 19: mod_base = OTHER; note = 2'O-methyl guanosine
  modified_base 20: mod_base = OTHER; note = 2'O-methyl guanosine
  modified_base 21: mod_base = OTHER; note = 2'O-methyl guanosine phosphorothioate
  modified_base 22: mod_base = OTHER; note = 2'O-methyl uridine phosphorothioate
  modified_base 23: mod_base = OTHER; note = 2'O-methyl uridine
ataagacattatcctaatgggtt

SEQ ID NO: 2055 - RNA, 23 nt, synthetic construct
  source 1..23: mol_type = other RNA
  modified_base 1: mod_base = OTHER; note = 5' vinyl phosphonate 2'O-methyl uridine phosphorothioate
  modified_base 2: mod_base = OTHER; note = 2'-fluoro cytidine phosphorothioate
  modified_base 3: mod_base = OTHER; note = 2'O-methyl cytidine
  modified_base 4: mod_base = OTHER; note = 2'O-methyl cytidine
  modified_base 5: mod_base = OTHER; note = 2'O-methyl cytidine
  modified_base 6: mod_base = OTHER; note = 2'O-methyl adenosine
  modified_base 7: mod_base = OTHER; note = 2'O-methyl uridine
  modified_base 8: mod_base = OTHER; note = 2'O-methyl cytidine
  modified_base 9: mod_base = OTHER; note = 2'O-methyl adenosine
  modified_base 10: mod_base = OTHER; note = 2'O-methyl guanosine
  modified_base 11: mod_base = OTHER; note = 2'O-methyl adenosine
  modified_base 12: mod_base = OTHER; note = 2'O-methyl cytidine
  modified_base 13: mod_base = OTHER; note = 2'O-methyl adenosine
  modified_base 14: mod_base = OTHER; note = 2'-fluoro cytidine
  modified_base 15: mod_base = OTHER; note = 2'O-methyl uridine
  modified_base 16: mod_base = OTHER; note = 2'O-methyl cytidine
  modified_base 17: mod_base = OTHER; note = 2'O-methyl uridine
  modified_base 18: mod_base = OTHER; note = 2'O-methyl guanosine
  modified_base 19: mod_base = OTHER; note = 2'O-methyl guanosine
  modified_base 20: mod_base = OTHER; note = 2'O-methyl uridine
  modified_base 21: mod_base = OTHER; note = 2'O-methyl adenosine phosphorothioate
  modified_base 22: mod_base = OTHER; note = 2'O-methyl uridine phosphorothioate
  modified_base 23: mod_base = OTHER; note = 2'O-methyl uridine
tccccatcagacactctggtatt

SEQ ID NO: 2056 - RNA, 23 nt, synthetic construct
  source 1..23: mol_type = other RNA
  modified_base 1: mod_base = OTHER; note = 5' vinyl phosphonate 2'O-methyl uridine phosphorothioate
  modified_base 2: mod_base = OTHER; note = 2'-fluoro uridine phosphorothioate
  modified_base 3: mod_base = OTHER; note = 2'O-methyl uridine
  modified_base 4: mod_base = OTHER; note = 2'O-methyl guanosine
  modified_base 5: mod_base = OTHER; note = 2'O-methyl guanosine
  modified_base 6: mod_base = OTHER; note = 2'O-methyl adenosine
  modified_base 7: mod_base = OTHER; note = 2'O-methyl cytidine
  modified_base 8: mod_base = OTHER; note = 2'O-methyl cytidine
  modified_base 9: mod_base = OTHER; note = 2'O-methyl guanosine
  modified_base 10: mod_base = OTHER; note = 2'O-methyl adenosine
  modified_base 11: mod_base = OTHER; note = 2'O-methyl adenosine
  modified_base 12: mod_base = OTHER; note = 2'O-methyl adenosine
  modified_base 13: mod_base = OTHER; note = 2'O-methyl guanosine
  modified_base 14: mod_base = OTHER; note = 2'-fluoro uridine
  modified_base 15: mod_base = OTHER; note = 2'O-methyl cytidine
  modified_base 16: mod_base = OTHER; note = 2'O-methyl adenosine
  modified_base 17: mod_base = OTHER; note = 2'O-methyl guanosine
  modified_base 18: mod_base = OTHER; note = 2'O-methyl adenosine
  modified_base 19: mod_base = OTHER; note = 2'O-methyl cytidine
  modified_base 20: mod_base = OTHER; note = 2'O-methyl adenosine
  modified_base 21: mod_base = OTHER; note = 2'O-methyl cytidine phosphorothioate
  modified_base 22: mod_base = OTHER; note = 2'O-methyl uridine phosphorothioate
  modified_base 23: mod_base = OTHER; note = 2'O-methyl uridine
tttggaccgaaagtcagacactt

SEQ ID NO: 2057 - RNA, 23 nt, synthetic construct
  source 1..23: mol_type = other RNA
  modified_base 1: mod_base = OTHER; note = 5' vinyl phosphonate 2'O-methyl adenosine phosphorothioate
  modified_base 2: mod_base = OTHER; note = 2'-fluoro uridine phosphorothioate
  modified_base 3: mod_base = OTHER; note = 2'O-methyl cytidine
  modified_base 4: mod_base = OTHER; note = 2'O-methyl cytidine
  modified_base 5: mod_base = OTHER; note = 2'O-methyl adenosine
  modified_base 6: mod_base = OTHER; note = 2'O-methyl cytidine
  modified_base 7: mod_base = OTHER; note = 2'O-methyl guanosine
  modified_base 8: mod_base = OTHER; note = 2'O-methyl adenosine
  modified_base 9: mod_base = OTHER; note = 2'O-methyl cytidine
  modified_base 10: mod_base = OTHER; note = 2'O-methyl uridine
  modified_base 11: mod_base = OTHER; note = 2'O-methyl uridine
  modified_base 12: mod_base = OTHER; note = 2'O-methyl cytidine
  modified_base 13: mod_base = OTHER; note = 2'O-methyl guanosine
  modified_base 14: mod_base = OTHER; note = 2'-fluoro uridine
  modified_base 15: mod_base = OTHER; note = 2'O-methyl cytidine
  modified_base 16: mod_base = OTHER; note = 2'O-methyl uridine
  modified_base 17: mod_base = OTHER; note = 2'O-methyl uridine
  modified_base 18: mod_base = OTHER; note = 2'O-methyl uridine
  modified_base 19: mod_base = OTHER; note = 2'O-methyl guanosine
  modified_base 20: mod_base = OTHER; note = 2'O-methyl guanosine
  modified_base 21: mod_base = OTHER; note = 2'O-methyl adenosine phosphorothioate
  modified_base 22: mod_base = OTHER; note = 2'O-methyl uridine phosphorothioate
  modified_base 23: mod_base = OTHER; note = 2'O-methyl uridine
atccacgacttcgtctttggatt

SEQ ID NO: 2058 - RNA, 23 nt, synthetic construct
  source 1..23: mol_type = other RNA
  modified_base 1: mod_base = OTHER; note = 5' vinyl phosphonate 2'O-methyl uridine phosphorothioate
  modified_base 2: mod_base = OTHER; note = 2'-fluoro adenosine phosphorothioate
  modified_base 3: mod_base = OTHER; note = 2'O-methyl cytidine
  modified_base 4: mod_base = OTHER; note = 2'O-methyl cytidine
  modified_base 5: mod_base = OTHER; note = 2'O-methyl adenosine
  modified_base 6: mod_base = OTHER; note = 2'O-methyl adenosine
  modified_base 7: mod_base = OTHER; note = 2'O-methyl guanosine
  modified_base 8: mod_base = OTHER; note = 2'O-methyl guanosine
  modified_base 9: mod_base = OTHER; note = 2'O-methyl cytidine
  modified_base 10: mod_base = OTHER; note = 2'O-methyl adenosine
  modified_base 11: mod_base = OTHER; note = 2'O-methyl uridine
  modified_base 12: mod_base = OTHER; note = 2'O-methyl cytidine
  modified_base 13: mod_base = OTHER; note = 2'O-methyl cytidine
  modified_base 14: mod_base = OTHER; note = 2'-fluoro adenosine
  modified_base 15: mod_base = OTHER; note = 2'O-methyl cytidine
  modified_base 16: mod_base = OTHER; note = 2'O-methyl guanosine
  modified_base 17: mod_base = OTHER; note = 2'O-methyl adenosine
  modified_base 18: mod_base = OTHER; note = 2'O-methyl cytidine
  modified_base 19: mod_base = OTHER; note = 2'O-methyl uridine
  modified_base 20: mod_base = OTHER; note = 2'O-methyl uridine
  modified_base 21: mod_base = OTHER; note = 2'O-methyl cytidine phosphorothioate
  modified_base 22: mod_base = OTHER; note = 2'O-methyl uridine phosphorothioate
  modified_base 23: mod_base = OTHER; note = 2'O-methyl uridine
taccaaggcatccacgacttctt

SEQ ID NO: 2059 - RNA, 23 nt, synthetic construct
  source 1..23: mol_type = other RNA
  modified_base 1: mod_base = OTHER; note = 5' vinyl phosphonate 2'O-methyl adenosine phosphorothioate
  modified_base 2: mod_base = OTHER; note = 2'-fluoro cytidine phosphorothioate
  modified_base 3: mod_base = OTHER; note = 2'O-methyl adenosine
  modified_base 4: mod_base = OTHER; note = 2'O-methyl uridine
  modified_base 5: mod_base = OTHER; note = 2'O-methyl adenosine
  modified_base 6: mod_base = OTHER; note = 2'O-methyl cytidine
  modified_base 7: mod_base = OTHER; note = 2'O-methyl cytidine
  modified_base 8: mod_base = OTHER; note = 2'O-methyl adenosine
  modified_base 9: mod_base = OTHER; note = 2'O-methyl adenosine
  modified_base 10: mod_base = OTHER; note = 2'O-methyl guanosine
  modified_base 11: mod_base = OTHER; note = 2'O-methyl guanosine
  modified_base 12: mod_base = OTHER; note = 2'O-methyl cytidine
  modified_base 13: mod_base = OTHER; note = 2'O-methyl adenosine
  modified_base 14: mod_base = OTHER; note = 2'-fluoro uridine
  modified_base 15: mod_base = OTHER; note = 2'O-methyl cytidine
  modified_base 16: mod_base = OTHER; note = 2'O-methyl cytidine
  modified_base 17: mod_base = OTHER; note = 2'O-methyl adenosine
  modified_base 18: mod_base = OTHER; note = 2'O-methyl cytidine
  modified_base 19: mod_base = OTHER; note = 2'O-methyl guanosine
  modified_base 20: mod_base = OTHER; note = 2'O-methyl adenosine
  modified_base 21: mod_base = OTHER; note = 2'O-methyl cytidine phosphorothioate
  modified_base 22: mod_base = OTHER; note = 2'O-methyl uridine phosphorothioate
  modified_base 23: mod_base = OTHER; note = 2'O-methyl uridine
acataccaaggcatccacgactt

SEQ ID NO: 2060 - RNA, 23 nt, synthetic construct
  source 1..23: mol_type = other RNA
  modified_base 1: mod_base = OTHER; note = 5' vinyl phosphonate 2'O-methyl adenosine phosphorothioate
  modified_base 2: mod_base = OTHER; note = 2'-fluoro adenosine phosphorothioate
  modified_base 3: mod_base = OTHER; note = 2'O-methyl cytidine
  modified_base 4: mod_base = OTHER; note = 2'O-methyl adenosine
  modified_base 5: mod_base = OTHER; note = 2'O-methyl uridine
  modified_base 6: mod_base = OTHER; note = 2'O-methyl adenosine
  modified_base 7: mod_base = OTHER; note = 2'O-methyl cytidine
  modified_base 8: mod_base = OTHER; note = 2'O-methyl cytidine
  modified_base 9: mod_base = OTHER; note = 2'O-methyl adenosine
  modified_base 10: mod_base = OTHER; note = 2'O-methyl adenosine
  modified_base 11: mod_base = OTHER; note = 2'O-methyl guanosine
  modified_base 12: mod_base = OTHER; note = 2'O-methyl guanosine
  modified_base 13: mod_base = OTHER; note = 2'O-methyl cytidine
  modified_base 14: mod_base = OTHER; note = 2'-fluoro adenosine
  modified_base 15: mod_base = OTHER; note = 2'O-methyl uridine
  modified_base 16: mod_base = OTHER; note = 2'O-methyl cytidine
  modified_base 17: mod_base = OTHER; note = 2'O-methyl cytidine
  modified_base 18: mod_base = OTHER; note = 2'O-methyl adenosine
  modified_base 19: mod_base = OTHER; note = 2'O-methyl cytidine
  modified_base 20: mod_base = OTHER; note = 2'O-methyl guanosine
  modified_base 21: mod_base = OTHER; note = 2'O-methyl adenosine phosphorothioate
  modified_base 22: mod_base = OTHER; note = 2'O-methyl uridine phosphorothioate
  modified_base 23: mod_base = OTHER; note = 2'O-methyl uridine
aacataccaaggcatccacgatt

SEQ ID NO: 2061 - RNA, 23 nt, synthetic construct
  source 1..23: mol_type = other RNA
  modified_base 1: mod_base = OTHER; note = 5' vinyl phosphonate 2'O-methyl guanosine phosphorothioate
  modified_base 2: mod_base = OTHER; note = 2'-fluoro adenosine phosphorothioate
  modified_base 3: mod_base = OTHER; note = 2'O-methyl adenosine
  modified_base 4: mod_base = OTHER; note = 2'O-methyl guanosine
  modified_base 5: mod_base = OTHER; note = 2'O-methyl cytidine
  modified_base 6: mod_base = OTHER; note = 2'O-methyl adenosine
  modified_base 7: mod_base = OTHER; note = 2'O-methyl guanosine
  modified_base 8: mod_base = OTHER; note = 2'O-methyl guanosine
  modified_base 9: mod_base = OTHER; note = 2'O-methyl adenosine
  modified_base 10: mod_base = OTHER; note = 2'O-methyl adenosine
  modified_base 11: mod_base = OTHER; note = 2'O-methyl cytidine
  modified_base 12: mod_base = OTHER; note = 2'O-methyl adenosine
  modified_base 13: mod_base = OTHER; note = 2'O-methyl uridine
  modified_base 14: mod_base = OTHER; note = 2'-fluoro adenosine
  modified_base 15: mod_base = OTHER; note = 2'O-methyl cytidine
  modified_base 16: mod_base = OTHER; note = 2'O-methyl cytidine
  modified_base 17: mod_base = OTHER; note = 2'O-methyl adenosine
  modified_base 18: mod_base = OTHER; note = 2'O-methyl adenosine
  modified_base 19: mod_base = OTHER; note = 2'O-methyl guanosine
  modified_base 20: mod_base = OTHER; note = 2'O-methyl guanosine
  modified_base 21: mod_base = OTHER; note = 2'O-methyl cytidine phosphorothioate
  modified_base 22: mod_base = OTHER; note = 2'O-methyl uridine phosphorothioate
  modified_base 23: mod_base = OTHER; note = 2'O-methyl uridine
gaagcaggaacataccaaggctt

SEQ ID NO: 2062 - RNA, 23 nt, synthetic construct
  source 1..23: mol_type = other RNA
  modified_base 1: mod_base = OTHER; note = 5' vinyl phosphonate 2'O-methyl cytidine phosphorothioate
  modified_base 2: mod_base = OTHER; note = 2'-fluoro guanosine phosphorothioate
  modified_base 3: mod_base = OTHER; note = 2'O-methyl guanosine
  modified_base 4: mod_base = OTHER; note = 2'O-methyl uridine
  modified_base 5: mod_base = OTHER; note = 2'O-methyl guanosine
  modified_base 6: mod_base = OTHER; note = 2'O-methyl adenosine
  modified_base 7: mod_base = OTHER; note = 2'O-methyl uridine
  modified_base 8: mod_base = OTHER; note = 2'O-methyl guanosine
  modified_base 9: mod_base = OTHER; note = 2'O-methyl guanosine
  modified_base 10: mod_base = OTHER; note = 2'O-methyl uridine
  modified_base 11: mod_base = OTHER; note = 2'O-methyl uridine
  modified_base 12: mod_base = OTHER; note = 2'O-methyl guanosine
  modified_base 13: mod_base = OTHER; note = 2'O-methyl uridine
  modified_base 14: mod_base = OTHER; note = 2'-fluoro uridine
  modified_base 15: mod_base = OTHER; note = 2'O-methyl uridine
  modified_base 16: mod_base = OTHER; note = 2'O-methyl uridine
  modified_base 17: mod_base = OTHER; note = 2'O-methyl guanosine
  modified_base 18: mod_base = OTHER; note = 2'O-methyl guanosine
  modified_base 19: mod_base = OTHER; note = 2'O-methyl cytidine
  modified_base 20: mod_base = OTHER; note = 2'O-methyl adenosine
  modified_base 21: mod_base = OTHER; note = 2'O-methyl uridine phosphorothioate
  modified_base 22: mod_base = OTHER; note = 2'O-methyl uridine phosphorothioate
  modified_base 23: mod_base = OTHER; note = 2'O-methyl uridine
cggtgatggttgttttggcattt

SEQ ID NO: 2063 - RNA, 23 nt, synthetic construct
  source 1..23: mol_type = other RNA
  modified_base 1: mod_base = OTHER; note = 5' vinyl phosphonate 2'O-methyl adenosine phosphorothioate
  modified_base 2: mod_base = OTHER; note = 2'-fluoro cytidine phosphorothioate
  modified_base 3: mod_base = OTHER; note = 2'O-methyl adenosine
  modified_base 4: mod_base = OTHER; note = 2'O-methyl cytidine
  modified_base 5: mod_base = OTHER; note = 2'O-methyl guanosine
  modified_base 6: mod_base = OTHER; note = 2'O-methyl guanosine
  modified_base 7: mod_base = OTHER; note = 2'O-methyl uridine
  modified_base 8: mod_base = OTHER; note = 2'O-methyl guanosine
  modified_base 9: mod_base = OTHER; note = 2'O-methyl adenosine
  modified_base 10: mod_base = OTHER; note = 2'O-methyl uridine
  modified_base 11: mod_base = OTHER; note = 2'O-methyl guanosine
  modified_base 12: mod_base = OTHER; note = 2'O-methyl guanosine
  modified_base 13: mod_base = OTHER; note = 2'O-methyl uridine
  modified_base 14: mod_base = OTHER; note = 2'-fluoro uridine
  modified_base 15: mod_base = OTHER; note = 2'O-methyl guanosine
  modified_base 16: mod_base = OTHER; note = 2'O-methyl uridine
  modified_base 17: mod_base = OTHER; note = 2'O-methyl uridine
  modified_base 18: mod_base = OTHER; note = 2'O-methyl uridine
  modified_base 19: mod_base = OTHER; note = 2'O-methyl uridine
  modified_base 20: mod_base = OTHER; note = 2'O-methyl guanosine
  modified_base 21: mod_base = OTHER; note = 2'O-methyl guanosine phosphorothioate
  modified_base 22: mod_base = OTHER; note = 2'O-methyl uridine phosphorothioate
  modified_base 23: mod_base = OTHER; note = 2'O-methyl uridine
acacggtgatggttgttttggtt

SEQ ID NO: 2064 - RNA, 23 nt, synthetic construct
  source 1..23: mol_type = other RNA
  modified_base 1: mod_base = OTHER; note = 5' vinyl phosphonate 2'O-methyl uridine phosphorothioate
  modified_base 2: mod_base = OTHER; note = 2'-fluoro uridine phosphorothioate
  modified_base 3: mod_base = OTHER; note = 2'O-methyl guanosine
  modified_base 4: mod_base = OTHER; note = 2'O-methyl adenosine
  modified_base 5: mod_base = OTHER; note = 2'O-methyl cytidine
  modified_base 6: mod_base = OTHER; note = 2'O-methyl uridine
  modified_base 7: mod_base = OTHER; note = 2'O-methyl uridine
  modified_base 8: mod_base = OTHER; note = 2'O-methyl uridine
  modified_base 9: mod_base = OTHER; note = 2'O-methyl adenosine
  modified_base 10: mod_base = OTHER; note = 2'O-methyl guanosine
  modified_base 11: mod_base = OTHER; note = 2'O-methyl guanosine
  modified_base 12: mod_base = OTHER; note = 2'O-methyl guanosine
  modified_base 13: mod_base = OTHER; note = 2'O-methyl cytidine
  modified_base 14: mod_base = OTHER; note = 2'-fluoro adenosine
  modified_base 15: mod_base = OTHER; note = 2'O-methyl guanosine
  modified_base 16: mod_base = OTHER; note = 2'O-methyl adenosine
  modified_base 17: mod_base = OTHER; note = 2'O-methyl uridine
  modified_base 18: mod_base = OTHER; note = 2'O-methyl guanosine
  modified_base 19: mod_base = OTHER; note = 2'O-methyl uridine
  modified_base 20: mod_base = OTHER; note = 2'O-methyl cytidine
  modified_base 21: mod_base = OTHER; note = 2'O-methyl guanosine phosphorothioate
  modified_base 22: mod_base = OTHER; note = 2'O-methyl uridine phosphorothioate
  modified_base 23: mod_base = OTHER; note = 2'O-methyl uridine
ttgactttagggcagatgtcgtt

SEQ ID NO: 2065 - RNA, 23 nt, synthetic construct
  source 1..23: mol_type = other RNA
  modified_base 1: mod_base = OTHER; note = 5' vinyl phosphonate 2'O-methyl guanosine phosphorothioate
  modified_base 2: mod_base = OTHER; note = 2'-fluoro cytidine phosphorothioate
  modified_base 3: mod_base = OTHER; note = 2'O-methyl guanosine
  modified_base 4: mod_base = OTHER; note = 2'O-methyl uridine
  modified_base 5: mod_base = OTHER; note = 2'O-methyl adenosine
  modified_base 6: mod_base = OTHER; note = 2'O-methyl guanosine
  modified_base 7: mod_base = OTHER; note = 2'O-methyl adenosine
  modified_base 8: mod_base = OTHER; note = 2'O-methyl cytidine
  modified_base 9: mod_base = OTHER; note = 2'O-methyl uridine
  modified_base 10: mod_base = OTHER; note = 2'O-methyl guanosine
  modified_base 11: mod_base = OTHER; note = 2'O-methyl adenosine
  modified_base 12: mod_base = OTHER; note = 2'O-methyl guanosine
  modified_base 13: mod_base = OTHER; note = 2'O-methyl cytidine
  modified_base 14: mod_base = OTHER; note = 2'-fluoro uridine
  modified_base 15: mod_base = OTHER; note = 2'O-methyl uridine
  modified_base 16: mod_base = OTHER; note = 2'O-methyl guanosine
  modified_base 17: mod_base = OTHER; note = 2'O-methyl guanosine
  modified_base 18: mod_base = OTHER; note = 2'O-methyl uridine
  modified_base 19: mod_base = OTHER; note = 2'O-methyl guanosine
  modified_base 20: mod_base = OTHER; note = 2'O-methyl adenosine
  modified_base 21: mod_base = OTHER; note = 2'O-methyl uridine phosphorothioate
  modified_base 22: mod_base = OTHER; note = 2'O-methyl uridine phosphorothioate
  modified_base 23: mod_base = OTHER; note = 2'O-methyl uridine
gcgtagactgagcttggtgattt

SEQ ID NO: 2066 - RNA, 23 nt, synthetic construct
  source 1..23: mol_type = other RNA
  modified_base 1: mod_base = OTHER; note = 5' vinyl phosphonate 2'O-methyl adenosine phosphorothioate
  modified_base 2: mod_base = OTHER; note = 2'-fluoro uridine phosphorothioate
  modified_base 3: mod_base = OTHER; note = 2'O-methyl adenosine
  modified_base 4: mod_base = OTHER; note = 2'O-methyl adenosine
  modified_base 5: mod_base = OTHER; note = 2'O-methyl guanosine
  modified_base 6: mod_base = OTHER; note = 2'O-methyl adenosine
  modified_base 7: mod_base = OTHER; note = 2'O-methyl cytidine
  modified_base 8: mod_base = OTHER; note = 2'O-methyl adenosine
  modified_base 9: mod_base = OTHER; note = 2'O-methyl uridine
  modified_base 10: mod_base = OTHER; note = 2'O-methyl uridine
  modified_base 11: mod_base = OTHER; note = 2'O-methyl adenosine
  modified_base 12: mod_base = OTHER; note = 2'O-methyl uridine
  modified_base 13: mod_base = OTHER; note = 2'O-methyl cytidine
  modified_base 14: mod_base = OTHER; note = 2'-fluoro cytidine
  modified_base 15: mod_base = OTHER; note = 2'O-methyl uridine
  modified_base 16: mod_base = OTHER; note = 2'O-methyl adenosine
  modified_base 17: mod_base = OTHER; note = 2'O-methyl adenosine
  modified_base 18: mod_base = OTHER; note = 2'O-methyl uridine
  modified_base 19: mod_base = OTHER; note = 2'O-methyl guanosine
  modified_base 20: mod_base = OTHER; note = 2'O-methyl guanosine
  modified_base 21: mod_base = OTHER; note = 2'O-methyl guanosine phosphorothioate
  modified_base 22: mod_base = OTHER; note = 2'O-methyl uridine phosphorothioate
  modified_base 23: mod_base = OTHER; note = 2'O-methyl uridine
ataagacattatcctaatgggtt

SEQ ID NO: 2067 - DNA, 1446 bp, Homo sapiens
  source 1..1446: mol_type = genomic DNA
atgtacgacgcagagcgcggctggagcttgtccttcgcgggctgcggcttcctgggcttctaccacgtcggggcgacccgctgcctgagcgagcacgccccgcacctcctccgcgacgcgcgcatgttgttcggcgcttcggccggggcgttgcactgcgtcggcgtcctctccggtatcccgctggagcagactctgcaggtcctctcagatcttgtgcggaaggccaggagtcggaacattggcatcttccatccatccttcaacttaagcaagttcctccgacagggtctctgcaaatgcctcccggccaatgtccaccagctcatctccggcaaaataggcatctctcttaccagagtgtctgatggggaaaacgttctggtgtctgactttcggtccaaagacgaagtcgtggatgccttggtatgttcctgcttcatgcccttctacagtggccttatccctccttccttcagaggcgtgcgatatgtggatggaggagtgagtgacaacgtacccttcattgatgccaaaacaaccatcaccgtgtcccccttctatggggagtacgacatctgccctaaagtcaagtccacgaactttcttcatgtggacatcaccaagctcagtctacgcctctgcacagggaacctctaccttctctcgagagcttttgtccccccggatctcaaggtgctgggagagatatgccttcgaggatatttggatgcattcaggttcttggaagagaagggcatctgcaacaggccccagccaggcctgaagtcatcctcagaagggatggatcctgaggtcgccatgcccagctgggcaaacatgagtctggattcttccccggagtcggctgccttggctgtgaggctggagggagatgagctgctagaccacctgcgtctcagcatcctgccctgggatgagagcatcctggacaccctctcgcccaggctcgctacagcactgagtgaagaaatgaaagacaaaggtggatacatgagcaagatttgcaacttgctacccattaggataatgtcttatgtaatgctgccctgtaccctgcctgtggaatctgccattgcgattgtccagagactggtgacatggcttccagatatgcccgacgatgtcctgtggttgcagtgggtgacctcacaggtgttcactcgagtgctgatgtgtctgctccccgcctccaggtcccaaatgccagtgagcagccaacaggcctccccatgcacacctgagcaggactggccctgctggactccctgctcccccaagggctgtccagcagagaccaaagcagaggccaccccgcggtccatcctcaggtccagcctgaacttcttcttgggcaataaagtacctgctggtgctgaggggctctccacctttcccagtttttcactagagaagagtctgtga

SEQ ID NO: 2068 - RNA, 19 nt, synthetic construct
  source 1..19: mol_type = other RNA
atgccttggtatgttcctg

SEQ ID NO: 2069 - RNA, 19 nt, synthetic construct
  source 1..19: mol_type = other RNA
atgccttggtatgttcctg

SEQ ID NO: 2070 - RNA, 19 nt, synthetic construct
  source 1..19: mol_type = other RNA
atgccttggtatgttcctg

SEQ ID NO: 2071 - RNA, 19 nt, synthetic construct
  source 1..19: mol_type = other RNA
atgccttggtatgttcctg

SEQ ID NO: 2072 - RNA, 19 nt, synthetic construct
  source 1..19: mol_type = other RNA
atgccttggtatgttcctg

SEQ ID NO: 2073 - RNA, 19 nt, synthetic construct
  source 1..19: mol_type = other RNA
atgccttggtatgttcctg

SEQ ID NO: 2074 - RNA, 19 nt, synthetic construct
  source 1..19: mol_type = other RNA
atgccttggtatgttcctg

SEQ ID NO: 2075 - RNA, 21 nt, synthetic construct
  source 1..21: mol_type = other RNA
atgccttggtatgttcctgct

SEQ ID NO: 2076 - RNA, 21 nt, synthetic construct
  source 1..21: mol_type = other RNA
ggatgccttggtatgttcctg

SEQ ID NO: 2077 - RNA, 19 nt, synthetic construct
  source 1..19: mol_type = other RNA
atgccttgatatgttcctg

SEQ ID NO: 2078 - RNA, 19 nt, synthetic construct
  source 1..19: mol_type = other RNA
atgccttggtttgttcctg

SEQ ID NO: 2079 - RNA, 19 nt, synthetic construct
  source 1..19: mol_type = other RNA
atgccttggtttgttcctg

SEQ ID NO: 2080 - RNA, 19 nt, synthetic construct
  source 1..19: mol_type = other RNA
atgccttggtatgttcctg

SEQ ID NO: 2081 - RNA, 19 nt, synthetic construct
  source 1..19: mol_type = other RNA
atgccttggtatgttcctg

SEQ ID NO: 2082 - RNA, 19 nt, synthetic construct
  source 1..19: mol_type = other RNA
atgccttggtatgttcctg

SEQ ID NO: 2083 - RNA, 19 nt, synthetic construct
  source 1..19: mol_type = other RNA
  modified_base 5: mod_base = OTHER; note = 2'-fluoro-2-Pyridone
atgcnttggtatgttcctg

SEQ ID NO: 2084 - RNA, 19 nt, synthetic construct
  source 1..19: mol_type = other RNA
  modified_base 17: mod_base = OTHER; note = 2'-OMe-3',4'-seco-cytidine
atgccttggtatgttcctg

SEQ ID NO: 2085 - RNA, 19 nt, synthetic construct
  source 1..19: mol_type = other RNA
atgccttggtatgttcctg

SEQ ID NO: 2086 - RNA, 19 nt, synthetic construct
  source 1..19: mol_type = other RNA
  modified_base 5: mod_base = OTHER; note = 2'-fluoro-2-Pyridone
atgcnttggtatgttcctg

SEQ ID NO: 2087 - RNA, 19 nt, synthetic construct
  source 1..19: mol_type = other RNA
  modified_base 5: mod_base = OTHER; note = 2'-fluoro-2-Pyridone
atgcnttggtatgttcctg

SEQ ID NO: 2088 - RNA, 19 nt, synthetic construct
  source 1..19: mol_type = other RNA
  modified_base 17: mod_base = OTHER; note = 2'-OMe-3',4'-seco-cytidine
atgccttggtatgttcctg

SEQ ID NO: 2089 - RNA, 19 nt, synthetic construct
  source 1..19: mol_type = other RNA
atgccttggtatgttcctg

SEQ ID NO: 2090 - RNA, 19 nt, synthetic construct
  source 1..19: mol_type = other RNA
atgccttggtatgttcctg

SEQ ID NO: 2091 - RNA, 21 nt, synthetic construct
  source 1..21: mol_type = other RNA
ggatgccttggtatgttcctg

SEQ ID NO: 2092 - RNA, 19 nt, synthetic construct
  source 1..19: mol_type = other RNA
atgccttggtttgttcctg

SEQ ID NO: 2093 - RNA, 21 nt, synthetic construct
  source 1..21: mol_type = other RNA
gtgtctgactttcggtccaaa

SEQ ID NO: 2094 - RNA, 21 nt, synthetic construct
  source 1..21: mol_type = other RNA
gtgtctgactttcggtccaaa

SEQ ID NO: 2095 - RNA, 21 nt, synthetic construct
  source 1..21: mol_type = other RNA
gtgtctgactttcggtccaaa

SEQ ID NO: 2096 - RNA, 21 nt, synthetic construct
  source 1..21: mol_type = other RNA
gtgtctgactttcggtccaaa

SEQ ID NO: 2097 - RNA, 21 nt, synthetic construct
  source 1..21: mol_type = other RNA
tccaaagacgaagtcgtggat

SEQ ID NO: 2098 - RNA, 21 nt, synthetic construct
  source 1..21: mol_type = other RNA
tccaaagacgaagtcgtggat

SEQ ID NO: 2099 - RNA, 21 nt, synthetic construct
  source 1..21: mol_type = other RNA
tccaaagacgaagtcgtggat

SEQ ID NO: 2100 - RNA, 21 nt, synthetic construct
  source 1..21: mol_type = other RNA
atgccaaaacaaccatcaccg

SEQ ID NO: 2101 - RNA, 21 nt, synthetic construct
  source 1..21: mol_type = other RNA
atgccaaaacaaccatcaccg

SEQ ID NO: 2102 - RNA, 21 nt, synthetic construct
  source 1..21: mol_type = other RNA
atgccaaaacaaccatcaccg

SEQ ID NO: 2103 - RNA, 21 nt, synthetic construct
  source 1..21: mol_type = other RNA
gaagtcgtggatgccttggta

SEQ ID NO: 2104 - RNA, 21 nt, synthetic construct
  source 1..21: mol_type = other RNA
gaagtcgtggatgccttggta

SEQ ID NO: 2105 - RNA, 21 nt, synthetic construct
  source 1..21: mol_type = other RNA
gaagtcgtggatgccttggta

SEQ ID NO: 2106 - RNA, 21 nt, synthetic construct
  source 1..21: mol_type = other RNA
tcgtggatgccttggtatgtt

SEQ ID NO: 2107 - RNA, 21 nt, synthetic construct
  source 1..21: mol_type = other RNA
agtcgtggatgccttggtatg

SEQ ID NO: 2108 - RNA, 21 nt, synthetic construct
  source 1..21: mol_type = other RNA
caggaacataccaaggcattt

SEQ ID NO: 2109 - RNA, 21 nt, synthetic construct
  source 1..21: mol_type = other RNA
aaggaacataccaaggcattt

SEQ ID NO: 2110 - RNA, 21 nt, synthetic construct
  source 1..21: mol_type = other RNA
aaggaacataccaaggcattt

SEQ ID NO: 2111 - RNA, 21 nt, synthetic construct
  source 1..21: mol_type = other RNA
taggaacataccaaggcattt

SEQ ID NO: 2112 - RNA, 21 nt, synthetic construct
  source 1..21: mol_type = other RNA
taggaacataccaaggcattt

SEQ ID NO: 2113 - RNA, 21 nt, synthetic construct
  source 1..21: mol_type = other RNA
caggaacataccaaggcatcc

SEQ ID NO: 2114 - RNA, 21 nt, synthetic construct
  source 1..21: mol_type = other RNA
aaggaacataccaaggcatcc

SEQ ID NO: 2115 - RNA, 23 nt, synthetic construct
  source 1..23: mol_type = other RNA
agcaggaacataccaaggcatcc

SEQ ID NO: 2116 - RNA, 23 nt, synthetic construct
  source 1..23: mol_type = other RNA
aaggaacataccaaggcatccac

SEQ ID NO: 2117 - RNA, 21 nt, synthetic construct
  source 1..21: mol_type = other RNA
taggaacatatcaaggcattt

SEQ ID NO: 2118 - RNA, 21 nt, synthetic construct
  source 1..21: mol_type = other RNA
taggaacaaaccaaggcattt

SEQ ID NO: 2119 - RNA, 21 nt, synthetic construct
  source 1..21: mol_type = other RNA
aaggaacaaaccaaggcatcc

SEQ ID NO: 2120 - RNA, 21 nt, synthetic construct
  source 1..21: mol_type = other RNA
caggaacataccaaggcattt

SEQ ID NO: 2121 - RNA, 21 nt, synthetic construct
  source 1..21: mol_type = other RNA
caggaacataccaaggcattt

SEQ ID NO: 2122 - RNA, 21 nt, synthetic construct
  source 1..21: mol_type = other RNA
caggaacataccaaggcattt

SEQ ID NO: 2123 - RNA, 21 nt, synthetic construct
  source 1..21: mol_type = other RNA
caggaacataccaaggcattt

SEQ ID NO: 2124 - RNA, 21 nt, synthetic construct
  source 1..21: mol_type = other RNA
caggaacataccaaggcatcc

SEQ ID NO: 2125 - RNA, 21 nt, synthetic construct
  source 1..21: mol_type = other RNA
aaggaacataccaaggcatcc

SEQ ID NO: 2126 - RNA, 21 nt, synthetic construct
  source 1..21: mol_type = other RNA
aaggaacataccaaggcatcc

SEQ ID NO: 2127 - RNA, 21 nt, synthetic construct
  source 1..21: mol_type = other RNA
aaggaacataccaaggcatcc

SEQ ID NO: 2128 - RNA, 21 nt, synthetic construct
  source 1..21: mol_type = other RNA
aaggaacataccaaggcatcc

SEQ ID NO: 2129 - RNA, 21 nt, synthetic construct
  source 1..21: mol_type = other RNA
aaggaacataccaaggcatcc

SEQ ID NO: 2130 - RNA, 21 nt, synthetic construct
  source 1..21: mol_type = other RNA
taggaacataccaaggcatcc

SEQ ID NO: 2131 - RNA, 23 nt, synthetic construct
  source 1..23: mol_type = other RNA
aaggaacataccaaggcatccac

SEQ ID NO: 2132 - RNA, 21 nt, synthetic construct
  source 1..21: mol_type = other RNA
aaggaacaaaccaaggcatcc

SEQ ID NO: 2133 - RNA, 23 nt, synthetic construct
  source 1..23: mol_type = other RNA
tttggaccgaaagtcagacactt

SEQ ID NO: 2134 - RNA, 23 nt, synthetic construct
  source 1..23: mol_type = other RNA
tttggaccgaaagtcagacacca

SEQ ID NO: 2135 - RNA, 23 nt, synthetic construct
  source 1..23: mol_type = other RNA
attggaccgaaagtcagacacca

SEQ ID NO: 2136 - RNA, 23 nt, synthetic construct
  source 1..23: mol_type = other RNA
attggaccgaaagtcagacacca

SEQ ID NO: 2137 - RNA, 23 nt, synthetic construct
  source 1..23: mol_type = other RNA
atccacgacttcgtctttggacc

SEQ ID NO: 2138 - RNA, 23 nt, synthetic construct
  source 1..23: mol_type = other RNA
ttccacgacttcgtctttggacc

SEQ ID NO: 2139 - RNA, 23 nt, synthetic construct
  source 1..23: mol_type = other RNA
ttccacgacttcgtctttggacc

SEQ ID NO: 2140 - RNA, 23 nt, synthetic construct
  source 1..23: mol_type = other RNA
aggtgatggttgttttggcattt

SEQ ID NO: 2141 - RNA, 23 nt, synthetic construct
  source 1..23: mol_type = other RNA
aggtgatggttgttttggcatca

SEQ ID NO: 2142 - RNA, 23 nt, synthetic construct
  source 1..23: mol_type = other RNA
aggtgatggttgttttggcatca

SEQ ID NO: 2143 - RNA, 23 nt, synthetic construct
  source 1..23: mol_type = other RNA
taccaaggcatccacgacttcgt

SEQ ID NO: 2144 - RNA, 23 nt, synthetic construct
  source 1..23: mol_type = other RNA
aaccaaggcatccacgacttcgt

SEQ ID NO: 2145 - RNA, 23 nt, synthetic construct
  source 1..23: mol_type = other RNA
aaccaaggcatccacgacttcgt

SEQ ID NO: 2146 - RNA, 23 nt, synthetic construct
  source 1..23: mol_type = other RNA
aacataccaaggcatccacgact

SEQ ID NO: 2147 - RNA, 23 nt, synthetic construct
  source 1..23: mol_type = other RNA
aataccaaggcatccacgacttc

SEQ ID NO: 2148 - RNA, 19 nt, synthetic construct
  source 1..19: mol_type = other RNA
  modified_base 1: mod_base = OTHER; note = 2'O-methyl adenosine phosphorothioate
  modified_base 2: mod_base = OTHER; note = 2'O-methyl uridine phosphorothioate
  modified_base 3: mod_base = OTHER; note = 2'O-methyl guanosine
  modified_base 4: mod_base = OTHER; note = 2'O-methyl cytidine
  modified_base 5: mod_base = OTHER; note = 2'-fluoro cytidine
  modified_base 6: mod_base = OTHER; note = 2'O-methyl uridine
  modified_base 7: mod_base = OTHER; note = 2'-fluoro uridine
  modified_base 8: mod_base = OTHER; note = 2'-fluoro guanosine
  modified_base 9: mod_base = OTHER; note = 2'-fluoro guanosine
  modified_base 10: mod_base = OTHER; note = 2'O-methyl uridine
  modified_base 11: mod_base = OTHER; note = 2'O-methyl adenosine
  modified_base 12: mod_base = OTHER; note = 2'O-methyl uridine
  modified_base 13: mod_base = OTHER; note = 2'O-methyl guanosine
  modified_base 14: mod_base = OTHER; note = 2'O-methyl uridine
  modified_base 15: mod_base = OTHER; note = 2'O-methyl uridine
  modified_base 16: mod_base = OTHER; note = 2'O-methyl cytidine
  modified_base 17: mod_base = OTHER; note = 2'O-methyl cytidine
  modified_base 18: mod_base = OTHER; note = 2'O-methyl uridine
  modified_base 19: mod_base = OTHER; note = 2'O-methyl guanosine 6-(5-(((2R,3R,4R,5R,6R)-3-acetamido-4,5-dihydroxy-6-(hydrox ymethyl)tetrahydro-2H-pyran-2-yl)oxy)pentanamido)-N-(6-(4-( hydroxymethyl)-4-(methoxymethyl)piperidin-1-yl)-6-oxohexyl) hexanamide-phosphorothioate-6-(5-(((2R,3R,4R,5R,6R)-3-aceta mido-4,5-dihydroxy-6-(hydroxymethyl)tetrahydro-2H-pyran-2-y l)oxy)pentanamido)-N-(6-(4-(hydroxymethyl)-4-(methoxymethyl )piperidin-1-yl)-6-oxohexyl)hexanamide-phosphorothioate-6-( 5-(((2R,3R,4R,5R,6R)-3-acetamido-4,5-dihydroxy-6-(hydroxyme thyl)tetrahydro-2H-pyran-2-yl)oxy)pentanamido)-N-(6-(4-(hyd roxymethyl)-4-(methoxymethyl)piperidin-1-yl)-6-oxohexyl)hex anamide
atgccttggtatgttcctg

SEQ ID NO: 2149 - RNA, 19 nt, synthetic construct
  source 1..19: mol_type = other RNA
  modified_base 1: mod_base = OTHER; note = 2'O-methyl adenosine phosphorothioate
  modified_base 2: mod_base = OTHER; note = 2'O-methyl uridine phosphorothioate
  modified_base 3: mod_base = OTHER; note = 2'O-methyl guanosine
  modified_base 4: mod_base = OTHER; note = 2'O-methyl cytidine
  modified_base 5: mod_base = OTHER; note = 2'-fluoro cytidine
  modified_base 6: mod_base = OTHER; note = 2'O-methyl uridine
  modified_base 7: mod_base = OTHER; note = 2'-fluoro uridine
  modified_base 8: mod_base = OTHER; note = 2'-fluoro guanosine
  modified_base 9: mod_base = OTHER; note = 2'-fluoro guanosine
  modified_base 10: mod_base = OTHER; note = 2'O-methyl uridine
  modified_base 11: mod_base = OTHER; note = 2'O-methyl adenosine
  modified_base 12: mod_base = OTHER; note = 2'O-methyl uridine
  modified_base 13: mod_base = OTHER; note = 2'O-methyl guanosine
  modified_base 14: mod_base = OTHER; note = 2'O-methyl uridine
  modified_base 15: mod_base = OTHER; note = 2'O-methyl uridine
  modified_base 16: mod_base = OTHER; note = 2'O-methyl cytidine
  modified_base 17: mod_base = OTHER; note = 2'O-methyl cytidine
  modified_base 18: mod_base = OTHER; note = 2'O-methyl uridine
  modified_base 19: mod_base = OTHER; note = 2'O-methyl guanosine 6-(5-(((2R,3R,4R,5R,6R)-3-acetamido-4,5-dihydroxy-6-(hydrox ymethyl)tetrahydro-2H-pyran-2-yl)oxy)pentanamido)-N-(6-(4-( hydroxymethyl)-4-(methoxymethyl)piperidin-1-yl)-6-oxohexyl) hexanamide-phosphorothioate-6-(5-(((2R,3R,4R,5R,6R)-3-aceta mido-4,5-dihydroxy-6-(hydroxymethyl)tetrahydro-2H-pyran-2-y l)oxy)pentanamido)-N-(6-(4-(hydroxymethyl)-4-(methoxymethyl )piperidin-1-yl)-6-oxohexyl)hexanamide-phosphorothioate-6-( 5-(((2R,3R,4R,5R,6R)-3-acetamido-4,5-dihydroxy-6-(hydroxyme thyl)tetrahydro-2H-pyran-2-yl)oxy)pentanamido)-N-(6-(4-(hyd roxymethyl)-4-(methoxymethyl)piperidin-1-yl)-6-oxohexyl)hex anamide
atgccttggtatgttcctg

SEQ ID NO: 2150 - RNA, 19 nt, synthetic construct
  source 1..19: mol_type = other RNA
  modified_base 1: mod_base = OTHER; note = 2'O-methyl adenosine phosphorothioate
  modified_base 2: mod_base = OTHER; note = 2'O-methyl uridine phosphorothioate
  modified_base 3: mod_base = OTHER; note = 2'O-methyl guanosine
  modified_base 4: mod_base = OTHER; note = 2'O-methyl cytidine
  modified_base 5: mod_base = OTHER; note = 2'-fluoro cytidine
  modified_base 6: mod_base = OTHER; note = 2'O-methyl uridine
  modified_base 7: mod_base = OTHER; note = 2'-fluoro uridine
  modified_base 8: mod_base = OTHER; note = 2'-fluoro guanosine
  modified_base 9: mod_base = OTHER; note = 2'-fluoro guanosine
  modified_base 10: mod_base = OTHER; note = 2'O-methyl uridine
  modified_base 11: mod_base = OTHER; note = 2'O-methyl adenosine
  modified_base 12: mod_base = OTHER; note = 2'O-methyl uridine
  modified_base 13: mod_base = OTHER; note = 2'O-methyl guanosine
  modified_base 14: mod_base = OTHER; note = 2'O-methyl uridine
  modified_base 15: mod_base = OTHER; note = 2'O-methyl uridine
  modified_base 16: mod_base = OTHER; note = 2'O-methyl cytidine
  modified_base 17: mod_base = OTHER; note = 2'O-methyl cytidine
  modified_base 18: mod_base = OTHER; note = 2'O-methyl uridine
  modified_base 19: mod_base = OTHER; note = 2'O-methyl guanosine 6-(5-(((2R,3R,4R,5R,6R)-3-acetamido-4,5-dihydroxy-6-(hydrox ymethyl)tetrahydro-2H-pyran-2-yl)oxy)pentanamido)-N-(6-(4-( hydroxymethyl)-4-(methoxymethyl)piperidin-1-yl)-6-oxohexyl) hexanamide-phosphorothioate-6-(5-(((2R,3R,4R,5R,6R)-3-aceta mido-4,5-dihydroxy-6-(hydroxymethyl)tetrahydro-2H-pyran-2-y l)oxy)pentanamido)-N-(6-(4-(hydroxymethyl)-4-(methoxymethyl )piperidin-1-yl)-6-oxohexyl)hexanamide-phosphorothioate-6-( 5-(((2R,3R,4R,5R,6R)-3-acetamido-4,5-dihydroxy-6-(hydroxyme thyl)tetrahydro-2H-pyran-2-yl)oxy)pentanamido)-N-(6-(4-(hyd roxymethyl)-4-(methoxymethyl)piperidin-1-yl)-6-oxohexyl)hex anamide
atgccttggtatgttcctg

SEQ ID NO: 2151 - RNA, 19 nt, synthetic construct
  source 1..19: mol_type = other RNA
  modified_base 1: mod_base = OTHER; note = 2'O-methyl adenosine phosphorothioate
  modified_base 2: mod_base = OTHER; note = 2'O-methyl uridine phosphorothioate
  modified_base 3: mod_base = OTHER; note = 2'O-methyl guanosine
  modified_base 4: mod_base = OTHER; note = 2'O-methyl cytidine
  modified_base 5: mod_base = OTHER; note = 2'-fluoro cytidine
  modified_base 6: mod_base = OTHER; note = 2'O-methyl uridine
  modified_base 7: mod_base = OTHER; note = 2'-fluoro uridine
  modified_base 8: mod_base = OTHER; note = 2'-fluoro guanosine
  modified_base 9: mod_base = OTHER; note = 2'-fluoro guanosine
  modified_base 10: mod_base = OTHER; note = 2'O-methyl uridine
  modified_base 11: mod_base = OTHER; note = 2'O-methyl adenosine
  modified_base 12: mod_base = OTHER; note = 2'O-methyl uridine
  modified_base 13: mod_base = OTHER; note = 2'O-methyl guanosine
  modified_base 14: mod_base = OTHER; note = 2'O-methyl uridine
  modified_base 15: mod_base = OTHER; note = 2'O-methyl uridine
  modified_base 16: mod_base = OTHER; note = 2'O-methyl cytidine
  modified_base 17: mod_base = OTHER; note = 2'O-methyl cytidine
  modified_base 18: mod_base = OTHER; note = 2'O-methyl uridine
  modified_base 19: mod_base = OTHER; note = 2'O-methyl guanosine 6-(5-(((2R,3R,4R,5R,6R)-3-acetamido-4,5-dihydroxy-6-(hydrox ymethyl)tetrahydro-2H-pyran-2-yl)oxy)pentanamido)-N-(6-(4-( hydroxymethyl)-4-(methoxymethyl)piperidin-1-yl)-6-oxohexyl) hexanamide-phosphorothioate-6-(5-(((2R,3R,4R,5R,6R)-3-aceta mido-4,5-dihydroxy-6-(hydroxymethyl)tetrahydro-2H-pyran-2-y l)oxy)pentanamido)-N-(6-(4-(hydroxymethyl)-4-(methoxymethyl )piperidin-1-yl)-6-oxohexyl)hexanamide-phosphorothioate-6-( 5-(((2R,3R,4R,5R,6R)-3-acetamido-4,5-dihydroxy-6-(hydroxyme thyl)tetrahydro-2H-pyran-2-yl)oxy)pentanamido)-N-(6-(4-(hyd roxymethyl)-4-(methoxymethyl)piperidin-1-yl)-6-oxohexyl)hex anamide
atgccttggtatgttcctg

SEQ ID NO: 2152 - RNA, 19 nt, synthetic construct
  source 1..19: mol_type = other RNA
  modified_base 1: mod_base = OTHER; note = 2'O-methyl adenosine phosphorothioate
  modified_base 2: mod_base = OTHER; note = 2'O-methyl uridine phosphorothioate
  modified_base 3: mod_base = OTHER; note = 2'O-methyl guanosine
  modified_base 4: mod_base = OTHER; note = 2'O-methyl cytidine
  modified_base 5: mod_base = OTHER; note = 2'-fluoro cytidine
  modified_base 6: mod_base = OTHER; note = 2'O-methyl uridine
  modified_base 7: mod_base = OTHER; note = 2'-fluoro uridine
  modified_base 8: mod_base = OTHER; note = 2'-fluoro guanosine
  modified_base 9: mod_base = OTHER; note = 2'-fluoro guanosine
  modified_base 10: mod_base = OTHER; note = 2'O-methyl uridine
  modified_base 11: mod_base = OTHER; note = 2'O-methyl adenosine
  modified_base 12: mod_base = OTHER; note = 2'O-methyl uridine
  modified_base 13: mod_base = OTHER; note = 2'O-methyl guanosine
  modified_base 14: mod_base = OTHER; note = 2'O-methyl uridine
  modified_base 15: mod_base = OTHER; note = 2'O-methyl uridine
  modified_base 16: mod_base = OTHER; note = 2'O-methyl cytidine
  modified_base 17: mod_base = OTHER; note = 2'O-methyl cytidine
  modified_base 18: mod_base = OTHER; note = 2'O-methyl uridine
  modified_base 19: mod_base = OTHER; note = 2'O-methyl guanosine 6-(5-(((2R,3R,4R,5R,6R)-3-acetamido-4,5-dihydroxy-6-(hydrox ymethyl)tetrahydro-2H-pyran-2-yl)oxy)pentanamido)-N-(6-(4-( hydroxymethyl)-4-(methoxymethyl)piperidin-1-yl)-6-oxohexyl) hexanamide-phosphorothioate-6-(5-(((2R,3R,4R,5R,6R)-3-aceta mido-4,5-dihydroxy-6-(hydroxymethyl)tetrahydro-2H-pyran-2-y l)oxy)pentanamido)-N-(6-(4-(hydroxymethyl)-4-(methoxymethyl )piperidin-1-yl)-6-oxohexyl)hexanamide-phosphorothioate-6-( 5-(((2R,3R,4R,5R,6R)-3-acetamido-4,5-dihydroxy-6-(hydroxyme thyl)tetrahydro-2H-pyran-2-yl)oxy)pentanamido)-N-(6-(4-(hyd roxymethyl)-4-(methoxymethyl)piperidin-1-yl)-6-oxohexyl)hex anamide
atgccttggtatgttcctg

SEQ ID NO: 2153 - RNA, 19 nt, synthetic construct
  source 1..19: mol_type = other RNA
  modified_base 1: mod_base = OTHER; note = 2'O-methyl adenosine phosphorothioate
  modified_base 2: mod_base = OTHER; note = 2'O-methyl uridine phosphorothioate
  modified_base 3: mod_base = OTHER; note = 2'O-methyl guanosine
  modified_base 4: mod_base = OTHER; note = 2'O-methyl cytidine
  modified_base 5: mod_base = OTHER; note = 2'-fluoro cytidine
  modified_base 6: mod_base = OTHER; note = 2'O-methyl uridine
  modified_base 7: mod_base = OTHER; note = 2'-fluoro uridine
  modified_base 8: mod_base = OTHER; note = 2'-fluoro guanosine
  modified_base 9: mod_base = OTHER; note = 2'-fluoro guanosine
  modified_base 10: mod_base = OTHER; note = 2'O-methyl uridine
  modified_base 11: mod_base = OTHER; note = 2'O-methyl adenosine
  modified_base 12: mod_base = OTHER; note = 2'O-methyl uridine
  modified_base 13: mod_base = OTHER; note = 2'O-methyl guanosine
  modified_base 14: mod_base = OTHER; note = 2'O-methyl uridine
  modified_base 15: mod_base = OTHER; note = 2'O-methyl uridine
  modified_base 16: mod_base = OTHER; note = 2'O-methyl cytidine
  modified_base 17: mod_base = OTHER; note = 2'O-methyl cytidine
  modified_base 18: mod_base = OTHER; note = 2'O-methyl uridine
  modified_base 19: mod_base = OTHER; note = 2'O-methyl guanosine 6-(5-(((2R,3R,4R,5R,6R)-3-acetamido-4,5-dihydroxy-6-(hydrox ymethyl)tetrahydro-2H-pyran-2-yl)oxy)pentanamido)-N-(6-(4-( hydroxymethyl)-4-(methoxymethyl)piperidin-1-yl)-6-oxohexyl) hexanamide-phosphorothioate-6-(5-(((2R,3R,4R,5R,6R)-3-aceta mido-4,5-dihydroxy-6-(hydroxymethyl)tetrahydro-2H-pyran-2-y l)oxy)pentanamido)-N-(6-(4-(hydroxymethyl)-4-(methoxymethyl )piperidin-1-yl)-6-oxohexyl)hexanamide-phosphorothioate-6-( 5-(((2R,3R,4R,5R,6R)-3-acetamido-4,5-dihydroxy-6-(hydroxyme thyl)tetrahydro-2H-pyran-2-yl)oxy)pentanamido)-N-(6-(4-(hyd roxymethyl)-4-(methoxymethyl)piperidin-1-yl)-6-oxohexyl)hex anamide
atgccttggtatgttcctg

SEQ ID NO: 2154 - RNA, 19 nt, synthetic construct
  source 1..19: mol_type = other RNA
  modified_base 1: mod_base = OTHER; note = 2'O-methyl adenosine phosphorothioate
  modified_base 2: mod_base = OTHER; note = 2'O-methyl uridine phosphorothioate
  modified_base 3: mod_base = OTHER; note = 2'O-methyl guanosine
  modified_base 4: mod_base = OTHER; note = 2'O-methyl cytidine
  modified_base 5: mod_base = OTHER; note = 2'-fluoro cytidine
  modified_base 6: mod_base = OTHER; note = 2'O-methyl uridine
  modified_base 7: mod_base = OTHER; note = 2'-fluoro uridine
  modified_base 8: mod_base = OTHER; note = 2'-fluoro guanosine
  modified_base 9: mod_base = OTHER; note = 2'-fluoro guanosine
  modified_base 10: mod_base = OTHER; note = 2'O-methyl uridine
  modified_base 11: mod_base = OTHER; note = 2'O-methyl adenosine
  modified_base 12: mod_base = OTHER; note = 2'O-methyl uridine
  modified_base 13: mod_base = OTHER; note = 2'O-methyl guanosine
  modified_base 14: mod_base = OTHER; note = 2'O-methyl uridine
  modified_base 15: mod_base = OTHER; note = 2'O-methyl uridine
  modified_base 16: mod_base = OTHER; note = 2'O-methyl cytidine
  modified_base 17: mod_base = OTHER; note = 2'O-methyl cytidine
  modified_base 18: mod_base = OTHER; note = 2'O-methyl uridine
  modified_base 19: mod_base = OTHER; note = 2'O-methyl guanosine 6-(5-(((2R,3R,4R,5R,6R)-3-acetamido-4,5-dihydroxy-6-(hydrox ymethyl)tetrahydro-2H-pyran-2-yl)oxy)pentanamido)-N-(6-(4-( hydroxymethyl)-4-(methoxymethyl)piperidin-1-yl)-6-oxohexyl) hexanamide-phosphorothioate-6-(5-(((2R,3R,4R,5R,6R)-3-aceta mido-4,5-dihydroxy-6-(hydroxymethyl)tetrahydro-2H-pyran-2-y l)oxy)pentanamido)-N-(6-(4-(hydroxymethyl)-4-(methoxymethyl )piperidin-1-yl)-6-oxohexyl)hexanamide-phosphorothioate-6-( 5-(((2R,3R,4R,5R,6R)-3-acetamido-4,5-dihydroxy-6-(hydroxyme thyl)tetrahydro-2H-pyran-2-yl)oxy)pentanamido)-N-(6-(4-(hyd roxymethyl)-4-(methoxymethyl)piperidin-1-yl)-6-oxohexyl)hex anamide
atgccttggtatgttcctg

SEQ ID NO: 2155 - RNA, 21 nt, synthetic construct
  source 1..21: mol_type = other RNA
  modified_base 1: mod_base = OTHER; note = 2'O-methyl adenosine phosphorothioate
  modified_base 2: mod_base = OTHER; note = 2'O-methyl uridine phosphorothioate
  modified_base 3: mod_base = OTHER; note = 2'O-methyl guanosine
  modified_base 4: mod_base = OTHER; note = 2'O-methyl cytidine
  modified_base 5: mod_base = OTHER; note = 2'O-methyl cytidine
  modified_base 6: mod_base = OTHER; note = 2'O-methyl uridine
  modified_base 7: mod_base = OTHER; note = 2'-fluoro uridine
  modified_base 8: mod_base = OTHER; note = 2'O-methyl guanosine
  modified_base 9: mod_base = OTHER; note = 2'-fluoro guanosine
  modified_base 10: mod_base = OTHER; note = 2'-fluoro uridine
  modified_base 11: mod_base = OTHER; note = 2'-fluoro adenosine
  modified_base 12: mod_base = OTHER; note = 2'O-methyl uridine
  modified_base 13: mod_base = OTHER; note = 2'O-methyl guanosine
  modified_base 14: mod_base = OTHER; note = 2'O-methyl uridine
  modified_base 15: mod_base = OTHER; note = 2'O-methyl uridine
  modified_base 16: mod_base = OTHER; note = 2'O-methyl cytidine
  modified_base 17: mod_base = OTHER; note = 2'O-methyl cytidine
  modified_base 18: mod_base = OTHER; note = 2'O-methyl uridine
  modified_base 19: mod_base = OTHER; note = 2'O-methyl guanosine
  modified_base 20: mod_base = OTHER; note = 2'O-methyl cytidine
  modified_base 21: mod_base = OTHER; note = 2'O-methyl uridine 6-(5-(((2R,3R,4R,5R,6R)-3-acetamido-4,5-dihydroxy-6-(hydrox ymethyl)tetrahydro-2H-pyran-2-yl)oxy)pentanamido)-N-(6-(4-( hydroxymethyl)-4-(methoxymethyl)piperidin-1-yl)-6-oxohexyl) hexanamide-phosphorothioate-6-(5-(((2R,3R,4R,5R,6R)-3-aceta mido-4,5-dihydroxy-6-(hydroxymethyl)tetrahydro-2H-pyran-2-y l)oxy)pentanamido)-N-(6-(4-(hydroxymethyl)-4-(methoxymethyl )piperidin-1-yl)-6-oxohexyl)hexanamide-phosphorothioate-6-( 5-(((2R,3R,4R,5R,6R)-3-acetamido-4,5-dihydroxy-6-(hydroxyme thyl)tetrahydro-2H-pyran-2-yl)oxy)pentanamido)-N-(6-(4-(hyd roxymethyl)-4-(methoxymethyl)piperidin-1-yl)-6-oxohexyl)hex anamide
atgccttggtatgttcctgct

SEQ ID NO: 2156 - RNA, 21 nt, synthetic construct
  source 1..21: mol_type = other RNA
  modified_base 1: mod_base = OTHER; note = 2'O-methyl guanosine phosphorothioate
  modified_base 2: mod_base = OTHER; note = 2'O-methyl guanosine phosphorothioate
  modified_base 3: mod_base = OTHER; note = 2'O-methyl adenosine
  modified_base 4: mod_base = OTHER; note = 2'O-methyl uridine
  modified_base 5: mod_base = OTHER; note = 2'O-methyl guanosine
  modified_base 6: mod_base = OTHER; note = 2'O-methyl cytidine
  modified_base 7: mod_base = OTHER; note = 2'-fluoro cytidine
  modified_base 8: mod_base = OTHER; note = 2'O-methyl uridine
  modified_base 9: mod_base = OTHER; note = 2'-fluoro uridine
  modified_base 10: mod_base = OTHER; note = 2'-fluoro guanosine
  modified_base 11: mod_base = OTHER; note = 2'-fluoro guanosine
  modified_base 12: mod_base = OTHER; note = 2'O-methyl uridine
  modified_base 13: mod_base = OTHER; note = 2'O-methyl adenosine
  modified_base 14: mod_base = OTHER; note = 2'O-methyl uridine
  modified_base 15: mod_base = OTHER; note = 2'O-methyl guanosine
  modified_base 16: mod_base = OTHER; note = 2'O-methyl uridine
  modified_base 17: mod_base = OTHER; note = 2'O-methyl uridine
  modified_base 18: mod_base = OTHER; note = 2'O-methyl cytidine
  modified_base 19: mod_base = OTHER; note = 2'O-methyl cytidine
  modified_base 20: mod_base = OTHER; note = 2'O-methyl uridine
  modified_base 21: mod_base = OTHER; note = 2'O-methyl guanosine 6-(5-(((2R,3R,4R,5R,6R)-3-acetamido-4,5-dihydroxy-6-(hydrox ymethyl)tetrahydro-2H-pyran-2-yl)oxy)pentanamido)-N-(6-(4-( hydroxymethyl)-4-(methoxymethyl)piperidin-1-yl)-6-oxohexyl) hexanamide-phosphorothioate-6-(5-(((2R,3R,4R,5R,6R)-3-aceta mido-4,5-dihydroxy-6-(hydroxymethyl)tetrahydro-2H-pyran-2-y l)oxy)pentanamido)-N-(6-(4-(hydroxymethyl)-4-(methoxymethyl )piperidin-1-yl)-6-oxohexyl)hexanamide-phosphorothioate-6-( 5-(((2R,3R,4R,5R,6R)-3-acetamido-4,5-dihydroxy-6-(hydroxyme thyl)tetrahydro-2H-pyran-2-yl)oxy)pentanamido)-N-(6-(4-(hyd roxymethyl)-4-(methoxymethyl)piperidin-1-yl)-6-oxohexyl)hex anamide
ggatgccttggtatgttcctg

SEQ ID NO: 2157 - RNA, 19 nt, synthetic construct
  source 1..19: mol_type = other RNA
  modified_base 1: mod_base = OTHER; note = 2'O-methyl adenosine phosphorothioate
  modified_base 2: mod_base = OTHER; note = 2'O-methyl uridine phosphorothioate
  modified_base 3: mod_base = OTHER; note = 2'O-methyl guanosine
  modified_base 4: mod_base = OTHER; note = 2'O-methyl cytidine
  modified_base 5: mod_base = OTHER; note = 2'-fluoro cytidine
  modified_base 6: mod_base = OTHER; note = 2'O-methyl uridine
  modified_base 7: mod_base = OTHER; note = 2'-fluoro uridine
  modified_base 8: mod_base = OTHER; note = 2'-fluoro guanosine
  modified_base 9: mod_base = OTHER; note = 2'-fluoro adenosine
  modified_base 10: mod_base = OTHER; note = 2'O-methyl uridine
  modified_base 11: mod_base = OTHER; note = 2'O-methyl adenosine
  modified_base 12: mod_base = OTHER; note = 2'O-methyl uridine
  modified_base 13: mod_base = OTHER; note = 2'O-methyl guanosine
  modified_base 14: mod_base = OTHER; note = 2'O-methyl uridine
  modified_base 15: mod_base = OTHER; note = 2'O-methyl uridine
  modified_base 16: mod_base = OTHER; note = 2'O-methyl cytidine
  modified_base 17: mod_base = OTHER; note = 2'O-methyl cytidine
  modified_base 18: mod_base = OTHER; note = 2'O-methyl uridine
  modified_base 19: mod_base = OTHER; note = 2'O-methyl guanosine 6-(5-(((2R,3R,4R,5R,6R)-3-acetamido-4,5-dihydroxy-6-(hydrox ymethyl)tetrahydro-2H-pyran-2-yl)oxy)pentanamido)-N-(6-(4-( hydroxymethyl)-4-(methoxymethyl)piperidin-1-yl)-6-oxohexyl) hexanamide-phosphorothioate-6-(5-(((2R,3R,4R,5R,6R)-3-aceta mido-4,5-dihydroxy-6-(hydroxymethyl)tetrahydro-2H-pyran-2-y l)oxy)pentanamido)-N-(6-(4-(hydroxymethyl)-4-(methoxymethyl )piperidin-1-yl)-6-oxohexyl)hexanamide-phosphorothioate-6-( 5-(((2R,3R,4R,5R,6R)-3-acetamido-4,5-dihydroxy-6-(hydroxyme thyl)tetrahydro-2H-pyran-2-yl)oxy)pentanamido)-N-(6-(4-(hyd roxymethyl)-4-(methoxymethyl)piperidin-1-yl)-6-oxohexyl)hex anamide
atgccttgatatgttcctg

SEQ ID NO: 2158 - RNA, 19 nt, synthetic construct
  source 1..19: mol_type = other RNA
  modified_base 1: mod_base = OTHER; note = 2'O-methyl adenosine phosphorothioate
  modified_base 2: mod_base = OTHER; note = 2'O-methyl uridine phosphorothioate
  modified_base 3: mod_base = OTHER; note = 2'O-methyl guanosine
  modified_base 4: mod_base = OTHER; note = 2'O-methyl cytidine
  modified_base 5: mod_base = OTHER; note = 2'-fluoro cytidine
  modified_base 6: mod_base = OTHER; note = 2'O-methyl uridine
  modified_base 7: mod_base = OTHER; note = 2'-fluoro uridine
  modified_base 8: mod_base = OTHER; note = 2'-fluoro guanosine
  modified_base 9: mod_base = OTHER; note = 2'-fluoro guanosine
  modified_base 10: mod_base = OTHER; note = 2'O-methyl uridine
  modified_base 11: mod_base = OTHER; note = 2'O-methyl uridine
  modified_base 12: mod_base = OTHER; note = 2'O-methyl uridine
  modified_base 13: mod_base = OTHER; note = 2'O-methyl guanosine
  modified_base 14: mod_base = OTHER; note = 2'O-methyl uridine
  modified_base 15: mod_base = OTHER; note = 2'O-methyl uridine
  modified_base 16: mod_base = OTHER; note = 2'O-methyl cytidine
  modified_base 17: mod_base = OTHER; note = 2'O-methyl cytidine
  modified_base 18: mod_base = OTHER; note = 2'O-methyl uridine
  modified_base 19: mod_base = OTHER; note = 2'O-methyl guanosine 6-(5-(((2R,3R,4R,5R,6R)-3-acetamido-4,5-dihydroxy-6-(hydrox ymethyl)tetrahydro-2H-pyran-2-yl)oxy)pentanamido)-N-(6-(4-( hydroxymethyl)-4-(methoxymethyl)piperidin-1-yl)-6-oxohexyl) hexanamide-phosphorothioate-6-(5-(((2R,3R,4R,5R,6R)-3-aceta mido-4,5-dihydroxy-6-(hydroxymethyl)tetrahydro-2H-pyran-2-y l)oxy)pentanamido)-N-(6-(4-(hydroxymethyl)-4-(methoxymethyl )piperidin-1-yl)-6-oxohexyl)hexanamide-phosphorothioate-6-( 5-(((2R,3R,4R,5R,6R)-3-acetamido-4,5-dihydroxy-6-(hydroxyme thyl)tetrahydro-2H-pyran-2-yl)oxy)pentanamido)-N-(6-(4-(hyd roxymethyl)-4-(methoxymethyl)piperidin-1-yl)-6-oxohexyl)hex anamide
atgccttggtttgttcctg

SEQ ID NO: 2159 - RNA, 19 nt, synthetic construct
  source 1..19: mol_type = other RNA
  modified_base 1: mod_base = OTHER; note = 2'O-methyl adenosine phosphorothioate
  modified_base 2: mod_base = OTHER; note = 2'O-methyl uridine phosphorothioate
  modified_base 3: mod_base = OTHER; note = 2'O-methyl guanosine
  modified_base 4: mod_base = OTHER; note = 2'O-methyl cytidine
  modified_base 5: mod_base = OTHER; note = 2'-fluoro cytidine
  modified_base 6: mod_base = OTHER; note = 2'O-methyl uridine
  modified_base 7: mod_base = OTHER; note = 2'-fluoro uridine
  modified_base 8: mod_base = OTHER; note = 2'-fluoro guanosine
  modified_base 9: mod_base = OTHER; note = 2'-fluoro guanosine
  modified_base 10: mod_base = OTHER; note = 2'O-methyl uridine
  modified_base 11: mod_base = OTHER; note = 2'O-methyl uridine
  modified_base 12: mod_base = OTHER; note = 2'O-methyl uridine
  modified_base 13: mod_base = OTHER; note = 2'O-methyl guanosine
  modified_base 14: mod_base = OTHER; note = 2'O-methyl uridine
  modified_base 15: mod_base = OTHER; note = 2'O-methyl uridine
  modified_base 16: mod_base = OTHER; note = 2'O-methyl cytidine
  modified_base 17: mod_base = OTHER; note = 2'O-methyl cytidine
  modified_base 18: mod_base = OTHER; note = 2'O-methyl uridine
  modified_base 19: mod_base = OTHER; note = 2'O-methyl guanosine 6-(5-(((2R,3R,4R,5R,6R)-3-acetamido-4,5-dihydroxy-6-(hydrox ymethyl)tetrahydro-2H-pyran-2-yl)oxy)pentanamido)-N-(6-(4-( hydroxymethyl)-4-(methoxymethyl)piperidin-1-yl)-6-oxohexyl) hexanamide-phosphorothioate-6-(5-(((2R,3R,4R,5R,6R)-3-aceta mido-4,5-dihydroxy-6-(hydroxymethyl)tetrahydro-2H-pyran-2-y l)oxy)pentanamido)-N-(6-(4-(hydroxymethyl)-4-(methoxymethyl )piperidin-1-yl)-6-oxohexyl)hexanamide-phosphorothioate-6-( 5-(((2R,3R,4R,5R,6R)-3-acetamido-4,5-dihydroxy-6-(hydroxyme thyl)tetrahydro-2H-pyran-2-yl)oxy)pentanamido)-N-(6-(4-(hyd roxymethyl)-4-(methoxymethyl)piperidin-1-yl)-6-oxohexyl)hex anamide
atgccttggtttgttcctg

SEQ ID NO: 2160 - RNA, 19 nt, synthetic construct
  source 1..19: mol_type = other RNA
  modified_base 1: mod_base = OTHER; note = 2'O-methyl adenosine phosphorothioate
  modified_base 2: mod_base = OTHER; note = 2'O-methyl uridine phosphorothioate
  modified_base 3: mod_base = OTHER; note = 2'O-methyl guanosine
  modified_base 4: mod_base = OTHER; note = 2'O-methyl cytidine
  modified_base 5: mod_base = OTHER; note = 2'-fluoro cytidine
  modified_base 6: mod_base = OTHER; note = 2'O-methyl uridine
  modified_base 7: mod_base = OTHER; note = 2'-fluoro uridine
  modified_base 8: mod_base = OTHER; note = 2'-fluoro guanosine
  modified_base 9: mod_base = OTHER; note = 2'-fluoro guanosine
  modified_base 10: mod_base = OTHER; note = 2'O-methyl uridine
  modified_base 11: mod_base = OTHER; note = 2'O-methyl adenosine
  modified_base 12: mod_base = OTHER; note = 2'O-methyl uridine
  modified_base 13: mod_base = OTHER; note = 2'O-methyl guanosine
  modified_base 14: mod_base = OTHER; note = 2'O-methyl uridine
  modified_base 15: mod_base = OTHER; note = 2'O-methyl uridine
  modified_base 16: mod_base = OTHER; note = 2'O-methyl cytidine
  modified_base 17: mod_base = OTHER; note = 2'O-methyl cytidine
  modified_base 18: mod_base = OTHER; note = 2'O-methyl uridine
  modified_base 19: mod_base = OTHER; note = 2'O-methyl guanosine 6-(5-(((2R,3R,4R,5R,6R)-3-acetamido-4,5-dihydroxy-6-(hydrox ymethyl)tetrahydro-2H-pyran-2-yl)oxy)pentanamido)-N-(6-(4-( hydroxymethyl)-4-(methoxymethyl)piperidin-1-yl)-6-oxohexyl) hexanamide-phosphorothioate-6-(5-(((2R,3R,4R,5R,6R)-3-aceta mido-4,5-dihydroxy-6-(hydroxymethyl)tetrahydro-2H-pyran-2-y l)oxy)pentanamido)-N-(6-(4-(hydroxymethyl)-4-(methoxymethyl )piperidin-1-yl)-6-oxohexyl)hexanamide-phosphorothioate-6-( 5-(((2R,3R,4R,5R,6R)-3-acetamido-4,5-dihydroxy-6-(hydroxyme thyl)tetrahydro-2H-pyran-2-yl)oxy)pentanamido)-N-(6-(4-(hyd roxymethyl)-4-(methoxymethyl)piperidin-1-yl)-6-oxohexyl)hex anamide
atgccttggtatgttcctg

SEQ ID NO: 2161 - RNA, 19 nt, synthetic construct
  source 1..19: mol_type = other RNA
  modified_base 1: mod_base = OTHER; note 6-(5-(((2R,3R,4R,5R,6R)-3-acetamido-4,5-dihydroxy-6-(hydrox ymethyl)tetrahydro-2H-pyran-2-yl)oxy)pentanamido)-N-(6-(4-( hydroxymethyl)-4-(methoxymethyl)piperidin-1-yl)-6-oxohexyl) hexanamide-phosphorothioate-6-(5-(((2R,3R,4R,5R,6R)-3-aceta mido-4,5-dihydroxy-6-(hydroxymethyl)tetrahydro-2H-pyran-2-y l)oxy)pentanamido)-N-(6-(4-(hydroxymethyl)-4-(methoxymethyl )piperidin-1-yl)-6-oxohexyl)hexanamide-phosphorothioate-6-( 5-(((2R,3R,4R,5R,6R)-3-acetamido-4,5-dihydroxy-6-(hydroxyme thyl)tetrahydro-2H-pyran-2-yl)oxy)pentanamido)-N-(6-(4-(hyd roxymethyl)-4-(methoxymethyl)piperidin-1-yl)-6-oxohexyl)hex anamide 2'O-methyl adenosine
  modified_base 2: mod_base = OTHER; note = 2'O-methyl uridine
  modified_base 3: mod_base = OTHER; note = 2'O-methyl guanosine
  modified_base 4: mod_base = OTHER; note = 2'O-methyl cytidine
  modified_base 5: mod_base = OTHER; note = 2'-fluoro cytidine
  modified_base 6: mod_base = OTHER; note = 2'O-methyl uridine
  modified_base 7: mod_base = OTHER; note = 2'-fluoro uridine
  modified_base 8: mod_base = OTHER; note = 2'-fluoro guanosine
  modified_base 9: mod_base = OTHER; note = 2'-fluoro guanosine
  modified_base 10: mod_base = OTHER; note = 2'O-methyl uridine
  modified_base 11: mod_base = OTHER; note = 2'O-methyl adenosine
  modified_base 12: mod_base = OTHER; note = 2'O-methyl uridine
  modified_base 13: mod_base = OTHER; note = 2'O-methyl guanosine
  modified_base 14: mod_base = OTHER; note = 2'O-methyl uridine
  modified_base 15: mod_base = OTHER; note = 2'O-methyl uridine
  modified_base 16: mod_base = OTHER; note = 2'O-methyl cytidine
  modified_base 17: mod_base = OTHER; note = 2'O-methyl cytidine
  modified_base 18: mod_base = OTHER; note = 2'O-methyl uridine
  modified_base 19: mod_base = OTHER; note = 2'O-methyl guanosine 6-(5-(((2R,3R,4R,5R,6R)-3-acetamido-4,5-dihydroxy-6-(hydrox ymethyl)tetrahydro-2H-pyran-2-yl)oxy)pentanamido)-N-(6-(4-( hydroxymethyl)-4-(methoxymethyl)piperidin-1-yl)-6-oxohexyl) hexanamide-phosphorothioate-6-(5-(((2R,3R,4R,5R,6R)-3-aceta mido-4,5-dihydroxy-6-(hydroxymethyl)tetrahydro-2H-pyran-2-y l)oxy)pentanamido)-N-(6-(4-(hydroxymethyl)-4-(methoxymethyl )piperidin-1-yl)-6-oxohexyl)hexanamide-phosphorothioate-6-( 5-(((2R,3R,4R,5R,6R)-3-acetamido-4,5-dihydroxy-6-(hydroxyme thyl)tetrahydro-2H-pyran-2-yl)oxy)pentanamido)-N-(6-(4-(hyd roxymethyl)-4-(methoxymethyl)piperidin-1-yl)-6-oxohexyl)hex anamide
atgccttggtatgttcctg

SEQ ID NO: 2162 - RNA, 19 nt, synthetic construct
  source 1..19: mol_type = other RNA
  modified_base 1: mod_base = OTHER; note = 2'O-methyl adenosine phosphorothioate
  modified_base 2: mod_base = OTHER; note = 2'O-methyl uridine phosphorothioate
  modified_base 3: mod_base = OTHER; note = 2'O-methyl guanosine
  modified_base 4: mod_base = OTHER; note = 2'O-methyl cytidine
  modified_base 5: mod_base = OTHER; note = 2'-fluoro cytidine
  modified_base 6: mod_base = OTHER; note = 2'O-methyl uridine
  modified_base 7: mod_base = OTHER; note = 2'-fluoro uridine
  modified_base 8: mod_base = OTHER; note = 2'-fluoro guanosine
  modified_base 9: mod_base = OTHER; note = 2'-fluoro guanosine
  modified_base 10: mod_base = OTHER; note = 2'O-methyl uridine
  modified_base 11: mod_base = OTHER; note = 2'O-methyl adenosine
  modified_base 12: mod_base = OTHER; note = 2'O-methyl uridine
  modified_base 13: mod_base = OTHER; note = 2'O-methyl guanosine
  modified_base 14: mod_base = OTHER; note = 2'O-methyl uridine
  modified_base 15: mod_base = OTHER; note = 2'O-methyl uridine
  modified_base 16: mod_base = OTHER; note = 2'O-methyl cytidine
  modified_base 17: mod_base = OTHER; note = 2'O-methyl cytidine
  modified_base 18: mod_base = OTHER; note = 2'O-methyl uridine
  modified_base 19: mod_base = OTHER; note = 2'O-methyl guanosine 6-(5-(((2R,3R,4R,5R,6R)-3-acetamido-4,5-dihydroxy-6-(hydrox ymethyl)tetrahydro-2H-pyran-2-yl)oxy)pentanamido)-N-(6-(4-( hydroxymethyl)-4-(methoxymethyl)piperidin-1-yl)-6-oxohexyl) hexanamide-phosphorothioate-6-(5-(((2R,3R,4R,5R,6R)-3-aceta mido-4,5-dihydroxy-6-(hydroxymethyl)tetrahydro-2H-pyran-2-y l)oxy)pentanamido)-N-(6-(4-(hydroxymethyl)-4-(methoxymethyl )piperidin-1-yl)-6-oxohexyl)hexanamide-phosphorothioate-6-( 5-(((2R,3R,4R,5R,6R)-3-acetamido-4,5-dihydroxy-6-(hydroxyme thyl)tetrahydro-2H-pyran-2-yl)oxy)pentanamido)-N-(6-(4-(hyd roxymethyl)-4-(methoxymethyl)piperidin-1-yl)-6-oxohexyl)hex anamide-phosphorothioate-6-(5-(((2R,3R,4R,5R,6R)-3-acetamid o-4,5-dihydroxy-6-(hydroxymethyl)tetrahydro-2H-pyran-2-yl)o xy)pentanamido)-N-(6-(4-(hydroxymethyl)-4-(methoxymethyl)pi peridin-1-yl)-6-oxohexyl)hexanamide
atgccttggtatgttcctg

SEQ ID NO: 2163 - RNA, 19 nt, synthetic construct
  source 1..19: mol_type = other RNA
  modified_base 1: mod_base = OTHER; note = 2'O-methyl adenosine phosphorothioate
  modified_base 2: mod_base = OTHER; note = 2'O-methyl uridine phosphorothioate
  modified_base 3: mod_base = OTHER; note = 2'O-methyl guanosine
  modified_base 4: mod_base = OTHER; note = 2'O-methyl cytidine
  modified_base 5: mod_base = OTHER; note = 2'-fluoro-2-Pyridone
  modified_base 6: mod_base = OTHER; note = 2'O-methyl uridine
  modified_base 7: mod_base = OTHER; note = 2'-fluoro uridine
  modified_base 8: mod_base = OTHER; note = 2'-fluoro guanosine
  modified_base 9: mod_base = OTHER; note = 2'-fluoro guanosine
  modified_base 10: mod_base = OTHER; note = 2'O-methyl uridine
  modified_base 11: mod_base = OTHER; note = 2'O-methyl adenosine
  modified_base 12: mod_base = OTHER; note = 2'O-methyl uridine
  modified_base 13: mod_base = OTHER; note = 2'O-methyl guanosine
  modified_base 14: mod_base = OTHER; note = 2'O-methyl uridine
  modified_base 15: mod_base = OTHER; note = 2'O-methyl uridine
  modified_base 16: mod_base = OTHER; note = 2'O-methyl cytidine
  modified_base 17: mod_base = OTHER; note = 2'O-methyl cytidine
  modified_base 18: mod_base = OTHER; note = 2'O-methyl uridine
  modified_base 19: mod_base = OTHER; note = 2'O-methyl guanosine 6-(5-(((2R,3R,4R,5R,6R)-3-acetamido-4,5-dihydroxy-6-(hydrox ymethyl)tetrahydro-2H-pyran-2-yl)oxy)pentanamido)-N-(6-(4-( hydroxymethyl)-4-(methoxymethyl)piperidin-1-yl)-6-oxohexyl) hexanamide-phosphorothioate-6-(5-(((2R,3R,4R,5R,6R)-3-aceta mido-4,5-dihydroxy-6-(hydroxymethyl)tetrahydro-2H-pyran-2-y l)oxy)pentanamido)-N-(6-(4-(hydroxymethyl)-4-(methoxymethyl )piperidin-1-yl)-6-oxohexyl)hexanamide-phosphorothioate-6-( 5-(((2R,3R,4R,5R,6R)-3-acetamido-4,5-dihydroxy-6-(hydroxyme thyl)tetrahydro-2H-pyran-2-yl)oxy)pentanamido)-N-(6-(4-(hyd roxymethyl)-4-(methoxymethyl)piperidin-1-yl)-6-oxohexyl)hex anamide
atgcnttggtatgttcctg

SEQ ID NO: 2164 - RNA, 19 nt, synthetic construct
  source 1..19: mol_type = other RNA
  modified_base 1: mod_base = OTHER; note = 2'O-methyl adenosine phosphorothioate
  modified_base 2: mod_base = OTHER; note = 2'O-methyl uridine phosphorothioate
  modified_base 3: mod_base = OTHER; note = 2'O-methyl guanosine
  modified_base 4: mod_base = OTHER; note = 2'O-methyl cytidine
  modified_base 5: mod_base = OTHER; note = 2'-fluoro cytidine
  modified_base 6: mod_base = OTHER; note = 2'O-methyl uridine
  modified_base 7: mod_base = OTHER; note = 2'-fluoro uridine
  modified_base 8: mod_base = OTHER; note = 2'-fluoro guanosine
  modified_base 9: mod_base = OTHER; note = 2'-fluoro guanosine
  modified_base 10: mod_base = OTHER; note = 2'O-methyl uridine
  modified_base 11: mod_base = OTHER; note = 2'O-methyl adenosine
  modified_base 12: mod_base = OTHER; note = 2'O-methyl uridine
  modified_base 13: mod_base = OTHER; note = 2'O-methyl guanosine
  modified_base 14: mod_base = OTHER; note = 2'O-methyl uridine
  modified_base 15: mod_base = OTHER; note = 2'O-methyl uridine
  modified_base 16: mod_base = OTHER; note = 2'O-methyl cytidine
  modified_base 17: mod_base = OTHER; note = 2'-OMe-3',4'-seco-cytidine
  modified_base 18: mod_base = OTHER; note = 2'O-methyl uridine
  modified_base 19: mod_base = OTHER; note = 2'O-methyl guanosine 6-(5-(((2R,3R,4R,5R,6R)-3-acetamido-4,5-dihydroxy-6-(hydrox ymethyl)tetrahydro-2H-pyran-2-yl)oxy)pentanamido)-N-(6-(4-( hydroxymethyl)-4-(methoxymethyl)piperidin-1-yl)-6-oxohexyl) hexanamide-phosphorothioate-6-(5-(((2R,3R,4R,5R,6R)-3-aceta mido-4,5-dihydroxy-6-(hydroxymethyl)tetrahydro-2H-pyran-2-y l)oxy)pentanamido)-N-(6-(4-(hydroxymethyl)-4-(methoxymethyl )piperidin-1-yl)-6-oxohexyl)hexanamide-phosphorothioate-6-( 5-(((2R,3R,4R,5R,6R)-3-acetamido-4,5-dihydroxy-6-(hydroxyme thyl)tetrahydro-2H-pyran-2-yl)oxy)pentanamido)-N-(6-(4-(hyd roxymethyl)-4-(methoxymethyl)piperidin-1-yl)-6-oxohexyl)hex anamide
atgccttggtatgttcctg

SEQ ID NO: 2165 - RNA, 19 nt, synthetic construct
  source 1..19: mol_type = other RNA
  modified_base 1: mod_base = OTHER; note = 2'O-methyl adenosine phosphorothioate
  modified_base 2: mod_base = OTHER; note = 2'O-methyl uridine phosphorothioate
  modified_base 3: mod_base = OTHER; note = 2'O-methyl guanosine
  modified_base 4: mod_base = OTHER; note = 2'O-methyl cytidine
  modified_base 5: mod_base = OTHER; note = 2'-fluoro cytidine
  modified_base 6: mod_base = OTHER; note = 2'O-methyl uridine
  modified_base 7: mod_base = OTHER; note = 2'-fluoro uridine
  modified_base 8: mod_base = OTHER; note = 2'-fluoro guanosine
  modified_base 9: mod_base = OTHER; note = 2'-fluoro guanosine
  modified_base 10: mod_base = OTHER; note = 2'O-methyl uridine
  modified_base 11: mod_base = OTHER; note = 2'O-methyl adenosine
  modified_base 12: mod_base = OTHER; note = 2'O-methyl uridine
  modified_base 13: mod_base = OTHER; note = 2'O-methyl guanosine
  modified_base 14: mod_base = OTHER; note = 2'O-methyl uridine
  modified_base 15: mod_base = OTHER; note = 2'O-methyl uridine
  modified_base 16: mod_base = OTHER; note = 2'O-methyl cytidine
  modified_base 17: mod_base = OTHER; note = 2'O-methyl cytidine
  modified_base 18: mod_base = OTHER; note = 2'O-methyl uridine
  modified_base 19: mod_base = OTHER; note = 2'O-methyl guanosine 6-(5-(((2R,3R,4R,5R,6R)-3-acetamido-4,5-dihydroxy-6-(hydrox ymethyl)tetrahydro-2H-pyran-2-yl)oxy)pentanamido)-N-(6-(4-( hydroxymethyl)-4-(methoxymethyl)piperidin-1-yl)-6-oxohexyl) hexanamide-phosphorothioate-6-(5-(((2R,3R,4R,5R,6R)-3-aceta mido-4,5-dihydroxy-6-(hydroxymethyl)tetrahydro-2H-pyran-2-y l)oxy)pentanamido)-N-(6-(4-(hydroxymethyl)-4-(methoxymethyl )piperidin-1-yl)-6-oxohexyl)hexanamide-phosphorothioate-6-( 5-(((2R,3R,4R,5R,6R)-3-acetamido-4,5-dihydroxy-6-(hydroxyme thyl)tetrahydro-2H-pyran-2-yl)oxy)pentanamido)-N-(6-(4-(hyd roxymethyl)-4-(methoxymethyl)piperidin-1-yl)-6-oxohexyl)hex anamide
atgccttggtatgttcctg

SEQ ID NO: 2166 - RNA, 19 nt, synthetic construct
  source 1..19: mol_type = other RNA
  modified_base 1: mod_base = OTHER; note = 2'O-methyl adenosine phosphorothioate
  modified_base 2: mod_base = OTHER; note = 2'O-methyl uridine phosphorothioate
  modified_base 3: mod_base = OTHER; note = 2'O-methyl guanosine
  modified_base 4: mod_base = OTHER; note = 2'O-methyl cytidine
  modified_base 5: mod_base = OTHER; note = 2'-fluoro-2-Pyridone
  modified_base 6: mod_base = OTHER; note = 2'O-methyl uridine
  modified_base 7: mod_base = OTHER; note = 2'-fluoro uridine
  modified_base 8: mod_base = OTHER; note = 2'-fluoro guanosine
  modified_base 9: mod_base = OTHER; note = 2'-fluoro guanosine
  modified_base 10: mod_base = OTHER; note = 2'O-methyl uridine
  modified_base 11: mod_base = OTHER; note = 2'O-methyl adenosine
  modified_base 12: mod_base = OTHER; note = 2'O-methyl uridine
  modified_base 13: mod_base = OTHER; note = 2'O-methyl guanosine
  modified_base 14: mod_base = OTHER; note = 2'O-methyl uridine
  modified_base 15: mod_base = OTHER; note = 2'O-methyl uridine
  modified_base 16: mod_base = OTHER; note = 2'O-methyl cytidine
  modified_base 17: mod_base = OTHER; note = 2'O-methyl cytidine
  modified_base 18: mod_base = OTHER; note = 2'O-methyl uridine
  modified_base 19: mod_base = OTHER; note = 2'O-methyl guanosine 6-(5-(((2R,3R,4R,5R,6R)-3-acetamido-4,5-dihydroxy-6-(hydrox ymethyl)tetrahydro-2H-pyran-2-yl)oxy)pentanamido)-N-(6-(4-( hydroxymethyl)-4-(methoxymethyl)piperidin-1-yl)-6-oxohexyl) hexanamide-phosphorothioate-6-(5-(((2R,3R,4R,5R,6R)-3-aceta mido-4,5-dihydroxy-6-(hydroxymethyl)tetrahydro-2H-pyran-2-y l)oxy)pentanamido)-N-(6-(4-(hydroxymethyl)-4-(methoxymethyl )piperidin-1-yl)-6-oxohexyl)hexanamide-phosphorothioate-6-( 5-(((2R,3R,4R,5R,6R)-3-acetamido-4,5-dihydroxy-6-(hydroxyme thyl)tetrahydro-2H-pyran-2-yl)oxy)pentanamido)-N-(6-(4-(hyd roxymethyl)-4-(methoxymethyl)piperidin-1-yl)-6-oxohexyl)hex anamide
atgcnttggtatgttcctg

SEQ ID NO: 2167 - RNA, 19 nt, synthetic construct
  source 1..19: mol_type = other RNA
  modified_base 1: mod_base = OTHER; note = 2'O-methyl adenosine phosphorothioate
  modified_base 2: mod_base = OTHER; note = 2'O-methyl uridine phosphorothioate
  modified_base 3: mod_base = OTHER; note = 2'O-methyl guanosine
  modified_base 4: mod_base = OTHER; note = 2'O-methyl cytidine
  modified_base 5: mod_base = OTHER; note = 2'-fluoro-2-Pyridone
  modified_base 6: mod_base = OTHER; note = 2'O-methyl uridine
  modified_base 7: mod_base = OTHER; note = 2'-fluoro uridine
  modified_base 8: mod_base = OTHER; note = 2'-fluoro guanosine
  modified_base 9: mod_base = OTHER; note = 2'-fluoro guanosine
  modified_base 10: mod_base = OTHER; note = 2'O-methyl uridine
  modified_base 11: mod_base = OTHER; note = 2'O-methyl adenosine
  modified_base 12: mod_base = OTHER; note = 2'O-methyl uridine
  modified_base 13: mod_base = OTHER; note = 2'O-methyl guanosine
  modified_base 14: mod_base = OTHER; note = 2'O-methyl uridine
  modified_base 15: mod_base = OTHER; note = 2'O-methyl uridine
  modified_base 16: mod_base = OTHER; note = 2'O-methyl cytidine
  modified_base 17: mod_base = OTHER; note = 2'O-methyl cytidine
  modified_base 18: mod_base = OTHER; note = 2'O-methyl uridine
  modified_base 19: mod_base = OTHER; note = 2'O-methyl guanosine 6-(5-(((2R,3R,4R,5R,6R)-3-acetamido-4,5-dihydroxy-6-(hydrox ymethyl)tetrahydro-2H-pyran-2-yl)oxy)pentanamido)-N-(6-(4-( hydroxymethyl)-4-(methoxymethyl)piperidin-1-yl)-6-oxohexyl) hexanamide-phosphorothioate-6-(5-(((2R,3R,4R,5R,6R)-3-aceta mido-4,5-dihydroxy-6-(hydroxymethyl)tetrahydro-2H-pyran-2-y l)oxy)pentanamido)-N-(6-(4-(hydroxymethyl)-4-(methoxymethyl )piperidin-1-yl)-6-oxohexyl)hexanamide-phosphorothioate-6-( 5-(((2R,3R,4R,5R,6R)-3-acetamido-4,5-dihydroxy-6-(hydroxyme thyl)tetrahydro-2H-pyran-2-yl)oxy)pentanamido)-N-(6-(4-(hyd roxymethyl)-4-(methoxymethyl)piperidin-1-yl)-6-oxohexyl)hex anamide
atgcnttggtatgttcctg

SEQ ID NO: 2168 - RNA, 19 nt, synthetic construct
  source 1..19: mol_type = other RNA
  modified_base 1: mod_base = OTHER; note = 2'O-methyl adenosine phosphorothioate
  modified_base 2: mod_base = OTHER; note = 2'O-methyl uridine phosphorothioate
  modified_base 3: mod_base = OTHER; note = 2'O-methyl guanosine
  modified_base 4: mod_base = OTHER; note = 2'O-methyl cytidine
  modified_base 5: mod_base = OTHER; note = 2'-fluoro cytidine
  modified_base 6: mod_base = OTHER; note = 2'O-methyl uridine
  modified_base 7: mod_base = OTHER; note = 2'-fluoro uridine
  modified_base 8: mod_base = OTHER; note = 2'-fluoro guanosine
  modified_base 9: mod_base = OTHER; note = 2'-fluoro guanosine
  modified_base 10: mod_base = OTHER; note = 2'O-methyl uridine
  modified_base 11: mod_base = OTHER; note = 2'O-methyl adenosine
  modified_base 12: mod_base = OTHER; note = 2'O-methyl uridine
  modified_base 13: mod_base = OTHER; note = 2'O-methyl guanosine
  modified_base 14: mod_base = OTHER; note = 2'O-methyl uridine
  modified_base 15: mod_base = OTHER; note = 2'O-methyl uridine
  modified_base 16: mod_base = OTHER; note = 2'O-methyl cytidine
  modified_base 17: mod_base = OTHER; note = 2'-OMe-3',4'-seco-cytidine
  modified_base 18: mod_base = OTHER; note = 2'O-methyl uridine
  modified_base 19: mod_base = OTHER; note = 2'O-methyl guanosine 6-(5-(((2R,3R,4R,5R,6R)-3-acetamido-4,5-dihydroxy-6-(hydrox ymethyl)tetrahydro-2H-pyran-2-yl)oxy)pentanamido)-N-(6-(4-( hydroxymethyl)-4-(methoxymethyl)piperidin-1-yl)-6-oxohexyl) hexanamide-phosphorothioate-6-(5-(((2R,3R,4R,5R,6R)-3-aceta mido-4,5-dihydroxy-6-(hydroxymethyl)tetrahydro-2H-pyran-2-y l)oxy)pentanamido)-N-(6-(4-(hydroxymethyl)-4-(methoxymethyl )piperidin-1-yl)-6-oxohexyl)hexanamide-phosphorothioate-6-( 5-(((2R,3R,4R,5R,6R)-3-acetamido-4,5-dihydroxy-6-(hydroxyme thyl)tetrahydro-2H-pyran-2-yl)oxy)pentanamido)-N-(6-(4-(hyd roxymethyl)-4-(methoxymethyl)piperidin-1-yl)-6-oxohexyl)hex anamide
atgccttggtatgttcctg

SEQ ID NO: 2169 - RNA, 19 nt, synthetic construct
  source 1..19: mol_type = other RNA
  modified_base 1: mod_base = OTHER; note 6-(5-(((2R,3R,4R,5R,6R)-3-acetamido-4,5-dihydroxy-6-(hydrox ymethyl)tetrahydro-2H-pyran-2-yl)oxy)pentanamido)-N-(6-(4-( hydroxymethyl)-4-(methoxymethyl)piperidin-1-yl)-6-oxohexyl) hexanamide-phosphorothioate-6-(5-(((2R,3R,4R,5R,6R)-3-aceta mido-4,5-dihydroxy-6-(hydroxymethyl)tetrahydro-2H-pyran-2-y l)oxy)pentanamido)-N-(6-(4-(hydroxymethyl)-4-(methoxymethyl )piperidin-1-yl)-6-oxohexyl)hexanamide-phosphorothioate-6-( 5-(((2R,3R,4R,5R,6R)-3-acetamido-4,5-dihydroxy-6-(hydroxyme thyl)tetrahydro-2H-pyran-2-yl)oxy)pentanamido)-N-(6-(4-(hyd roxymethyl)-4-(methoxymethyl)piperidin-1-yl)-6-oxohexyl)hex anamide 2'O-methyl adenosine
  modified_base 2: mod_base = OTHER; note = 2'O-methyl uridine
  modified_base 3: mod_base = OTHER; note = 2'O-methyl guanosine
  modified_base 4: mod_base = OTHER; note = 2'O-methyl cytidine
  modified_base 5: mod_base = OTHER; note = 2'-fluoro cytidine
  modified_base 6: mod_base = OTHER; note = 2'O-methyl uridine
  modified_base 7: mod_base = OTHER; note = 2'-fluoro uridine
  modified_base 8: mod_base = OTHER; note = 2'-fluoro guanosine
  modified_base 9: mod_base = OTHER; note = 2'-fluoro guanosine
  modified_base 10: mod_base = OTHER; note = 2'O-methyl uridine
  modified_base 11: mod_base = OTHER; note = 2'O-methyl adenosine
  modified_base 12: mod_base = OTHER; note = 2'O-methyl uridine
  modified_base 13: mod_base = OTHER; note = 2'O-methyl guanosine
  modified_base 14: mod_base = OTHER; note = 2'O-methyl uridine
  modified_base 15: mod_base = OTHER; note = 2'O-methyl uridine
  modified_base 16: mod_base = OTHER; note = 2'O-methyl cytidine
  modified_base 17: mod_base = OTHER; note = 2'O-methyl cytidine
  modified_base 18: mod_base = OTHER; note = 2'O-methyl uridine
  modified_base 19: mod_base = OTHER; note = 2'O-methyl guanosine 6-(5-(((2R,3R,4R,5R,6R)-3-acetamido-4,5-dihydroxy-6-(hydrox ymethyl)tetrahydro-2H-pyran-2-yl)oxy)pentanamido)-N-(6-(4-( hydroxymethyl)-4-(methoxymethyl)piperidin-1-yl)-6-oxohexyl) hexanamide-phosphorothioate-6-(5-(((2R,3R,4R,5R,6R)-3-aceta mido-4,5-dihydroxy-6-(hydroxymethyl)tetrahydro-2H-pyran-2-y l)oxy)pentanamido)-N-(6-(4-(hydroxymethyl)-4-(methoxymethyl )piperidin-1-yl)-6-oxohexyl)hexanamide-phosphorothioate-6-( 5-(((2R,3R,4R,5R,6R)-3-acetamido-4,5-dihydroxy-6-(hydroxyme thyl)tetrahydro-2H-pyran-2-yl)oxy)pentanamido)-N-(6-(4-(hyd roxymethyl)-4-(methoxymethyl)piperidin-1-yl)-6-oxohexyl)hex anamide
atgccttggtatgttcctg

SEQ ID NO: 2170 - RNA, 19 nt, synthetic construct
  source 1..19: mol_type = other RNA
  modified_base 1: mod_base = OTHER; note = 2'O-methyl adenosine phosphorothioate
  modified_base 2: mod_base = OTHER; note = 2'O-methyl uridine phosphorothioate
  modified_base 3: mod_base = OTHER; note = 2'O-methyl guanosine
  modified_base 4: mod_base = OTHER; note = 2'O-methyl cytidine
  modified_base 5: mod_base = OTHER; note = 2'-fluoro cytidine
  modified_base 6: mod_base = OTHER; note = 2'O-methyl uridine
  modified_base 7: mod_base = OTHER; note = 2'-fluoro uridine
  modified_base 8: mod_base = OTHER; note = 2'-fluoro guanosine
  modified_base 9: mod_base = OTHER; note = 2'-fluoro guanosine
  modified_base 10: mod_base = OTHER; note = 2'O-methyl uridine
  modified_base 11: mod_base = OTHER; note = 2'O-methyl adenosine
  modified_base 12: mod_base = OTHER; note = 2'O-methyl uridine
  modified_base 13: mod_base = OTHER; note = 2'O-methyl guanosine
  modified_base 14: mod_base = OTHER; note = 2'O-methyl uridine
  modified_base 15: mod_base = OTHER; note = 2'O-methyl uridine
  modified_base 16: mod_base = OTHER; note = 2'O-methyl cytidine
  modified_base 17: mod_base = OTHER; note = 2'O-methyl cytidine
  modified_base 18: mod_base = OTHER; note = 2'O-methyl uridine
  modified_base 19: mod_base = OTHER; note = 2'O-methyl guanosine 6-(5-(((2R,3R,4R,5R,6R)-3-acetamido-4,5-dihydroxy-6-(hydrox ymethyl)tetrahydro-2H-pyran-2-yl)oxy)pentanamido)-N-(6-(4-( hydroxymethyl)-4-(methoxymethyl)piperidin-1-yl)-6-oxohexyl) hexanamide-phosphorothioate-6-(5-(((2R,3R,4R,5R,6R)-3-aceta mido-4,5-dihydroxy-6-(hydroxymethyl)tetrahydro-2H-pyran-2-y l)oxy)pentanamido)-N-(6-(4-(hydroxymethyl)-4-(methoxymethyl )piperidin-1-yl)-6-oxohexyl)hexanamide-phosphorothioate-6-( 5-(((2R,3R,4R,5R,6R)-3-acetamido-4,5-dihydroxy-6-(hydroxyme thyl)tetrahydro-2H-pyran-2-yl)oxy)pentanamido)-N-(6-(4-(hyd roxymethyl)-4-(methoxymethyl)piperidin-1-yl)-6-oxohexyl)hex anamide
atgccttggtatgttcctg

SEQ ID NO: 2171 - RNA, 21 nt, synthetic construct
  source 1..21: mol_type = other RNA
  modified_base 1: mod_base = OTHER; note = 2'O-methyl guanosine phosphorothioate
  modified_base 2: mod_base = OTHER; note = 2'O-methyl guanosine phosphorothioate
  modified_base 3: mod_base = OTHER; note = 2'O-methyl adenosine
  modified_base 4: mod_base = OTHER; note = 2'O-methyl uridine
  modified_base 5: mod_base = OTHER; note = 2'O-methyl guanosine
  modified_base 6: mod_base = OTHER; note = 2'O-methyl cytidine
  modified_base 7: mod_base = OTHER; note = 2'-fluoro cytidine
  modified_base 8: mod_base = OTHER; note = 2'O-methyl uridine
  modified_base 9: mod_base = OTHER; note = 2'-fluoro uridine
  modified_base 10: mod_base = OTHER; note = 2'-fluoro guanosine
  modified_base 11: mod_base = OTHER; note = 2'-fluoro guanosine
  modified_base 12: mod_base = OTHER; note = 2'O-methyl uridine
  modified_base 13: mod_base = OTHER; note = 2'O-methyl adenosine
  modified_base 14: mod_base = OTHER; note = 2'O-methyl uridine
  modified_base 15: mod_base = OTHER; note = 2'O-methyl guanosine
  modified_base 16: mod_base = OTHER; note = 2'O-methyl uridine
  modified_base 17: mod_base = OTHER; note = 2'O-methyl uridine
  modified_base 18: mod_base = OTHER; note = 2'O-methyl cytidine
  modified_base 19: mod_base = OTHER; note = 2'O-methyl cytidine
  modified_base 20: mod_base = OTHER; note = 2'O-methyl uridine
  modified_base 21: mod_base = OTHER; note = 2'O-methyl guanosine 6-(5-(((2R,3R,4R,5R,6R)-3-acetamido-4,5-dihydroxy-6-(hydrox ymethyl)tetrahydro-2H-pyran-2-yl)oxy)pentanamido)-N-(6-(4-( hydroxymethyl)-4-(methoxymethyl)piperidin-1-yl)-6-oxohexyl) hexanamide-phosphorothioate-6-(5-(((2R,3R,4R,5R,6R)-3-aceta mido-4,5-dihydroxy-6-(hydroxymethyl)tetrahydro-2H-pyran-2-y l)oxy)pentanamido)-N-(6-(4-(hydroxymethyl)-4-(methoxymethyl )piperidin-1-yl)-6-oxohexyl)hexanamide-phosphorothioate-6-( 5-(((2R,3R,4R,5R,6R)-3-acetamido-4,5-dihydroxy-6-(hydroxyme thyl)tetrahydro-2H-pyran-2-yl)oxy)pentanamido)-N-(6-(4-(hyd roxymethyl)-4-(methoxymethyl)piperidin-1-yl)-6-oxohexyl)hex anamide
ggatgccttggtatgttcctg

SEQ ID NO: 2172 - RNA, 19 nt, synthetic construct
  source 1..19: mol_type = other RNA
  modified_base 1: mod_base = OTHER; note = 2'O-methyl adenosine phosphorothioate
  modified_base 2: mod_base = OTHER; note = 2'O-methyl uridine phosphorothioate
  modified_base 3: mod_base = OTHER; note = 2'O-methyl guanosine
  modified_base 4: mod_base = OTHER; note = 2'O-methyl cytidine
  modified_base 5: mod_base = OTHER; note = 2'-fluoro cytidine
  modified_base 6: mod_base = OTHER; note = 2'O-methyl uridine
  modified_base 7: mod_base = OTHER; note = 2'-fluoro uridine
  modified_base 8: mod_base = OTHER; note = 2'-fluoro guanosine
  modified_base 9: mod_base = OTHER; note = 2'-fluoro guanosine
  modified_base 10: mod_base = OTHER; note = 2'O-methyl uridine
  modified_base 11: mod_base = OTHER; note = 2'O-methyl uridine
  modified_base 12: mod_base = OTHER; note = 2'O-methyl uridine
  modified_base 13: mod_base = OTHER; note = 2'O-methyl guanosine
  modified_base 14: mod_base = OTHER; note = 2'O-methyl uridine
  modified_base 15: mod_base = OTHER; note = 2'O-methyl uridine
  modified_base 16: mod_base = OTHER; note = 2'O-methyl cytidine
  modified_base 17: mod_base = OTHER; note = 2'O-methyl cytidine
  modified_base 18: mod_base = OTHER; note = 2'O-methyl uridine
  modified_base 19: mod_base = OTHER; note = 2'O-methyl guanosine 6-(5-(((2R,3R,4R,5R,6R)-3-acetamido-4,5-dihydroxy-6-(hydrox ymethyl)tetrahydro-2H-pyran-2-yl)oxy)pentanamido)-N-(6-(4-( hydroxymethyl)-4-(methoxymethyl)piperidin-1-yl)-6-oxohexyl) hexanamide-phosphorothioate-6-(5-(((2R,3R,4R,5R,6R)-3-aceta mido-4,5-dihydroxy-6-(hydroxymethyl)tetrahydro-2H-pyran-2-y l)oxy)pentanamido)-N-(6-(4-(hydroxymethyl)-4-(methoxymethyl )piperidin-1-yl)-6-oxohexyl)hexanamide-phosphorothioate-6-( 5-(((2R,3R,4R,5R,6R)-3-acetamido-4,5-dihydroxy-6-(hydroxyme thyl)tetrahydro-2H-pyran-2-yl)oxy)pentanamido)-N-(6-(4-(hyd roxymethyl)-4-(methoxymethyl)piperidin-1-yl)-6-oxohexyl)hex anamide
atgccttggtttgttcctg

SEQ ID NO: 2173 - RNA, 21 nt, synthetic construct
  source 1..21: mol_type = other RNA
  modified_base 1: mod_base = OTHER; note = 2'O-methyl guanosine phosphorothioate
  modified_base 2: mod_base = OTHER; note = 2'O-methyl uridine phosphorothioate
  modified_base 3: mod_base = OTHER; note = 2'O-methyl guanosine
  modified_base 4: mod_base = OTHER; note = 2'O-methyl uridine
  modified_base 5: mod_base = OTHER; note = 2'O-methyl cytidine
  modified_base 6: mod_base = OTHER; note = 2'O-methyl uridine
  modified_base 7: mod_base = OTHER; note = 2'-fluoro guanosine
  modified_base 8: mod_base = OTHER; note = 2'O-methyl adenosine
  modified_base 9: mod_base = OTHER; note = 2'-fluoro cytidine
  modified_base 10: mod_base = OTHER; note = 2'-fluoro uridine
  modified_base 11: mod_base = OTHER; note = 2'-fluoro uridine
  modified_base 12: mod_base = OTHER; note = 2'O-methyl uridine
  modified_base 13: mod_base = OTHER; note = 2'O-methyl cytidine
  modified_base 14: mod_base = OTHER; note = 2'O-methyl guanosine
  modified_base 15: mod_base = OTHER; note = 2'O-methyl guanosine
  modified_base 16: mod_base = OTHER; note = 2'O-methyl uridine
  modified_base 17: mod_base = OTHER; note = 2'O-methyl cytidine
  modified_base 18: mod_base = OTHER; note = 2'O-methyl cytidine
  modified_base 19: mod_base = OTHER; note = 2'O-methyl adenosine
  modified_base 20: mod_base = OTHER; note = 2'O-methyl adenosine
  modified_base 21: mod_base = OTHER; note = 2'O-methyl adenosine 6-(5-(((2R,3R,4R,5R,6R)-3-acetamido-4,5-dihydroxy-6-(hydrox ymethyl)tetrahydro-2H-pyran-2-yl)oxy)pentanamido)-N-(6-(4-( hydroxymethyl)-4-(methoxymethyl)piperidin-1-yl)-6-oxohexyl) hexanamide-phosphorothioate-6-(5-(((2R,3R,4R,5R,6R)-3-aceta mido-4,5-dihydroxy-6-(hydroxymethyl)tetrahydro-2H-pyran-2-y l)oxy)pentanamido)-N-(6-(4-(hydroxymethyl)-4-(methoxymethyl )piperidin-1-yl)-6-oxohexyl)hexanamide-phosphorothioate-6-( 5-(((2R,3R,4R,5R,6R)-3-acetamido-4,5-dihydroxy-6-(hydroxyme thyl)tetrahydro-2H-pyran-2-yl)oxy)pentanamido)-N-(6-(4-(hyd roxymethyl)-4-(methoxymethyl)piperidin-1-yl)-6-oxohexyl)hex anamide
gtgtctgactttcggtccaaa

SEQ ID NO: 2174 - RNA, 21 nt, synthetic construct
  source 1..21: mol_type = other RNA
  modified_base 1: mod_base = OTHER; note = 2'O-methyl guanosine phosphorothioate
  modified_base 2: mod_base = OTHER; note = 2'O-methyl uridine phosphorothioate
  modified_base 3: mod_base = OTHER; note = 2'O-methyl guanosine
  modified_base 4: mod_base = OTHER; note = 2'O-methyl uridine
  modified_base 5: mod_base = OTHER; note = 2'O-methyl cytidine
  modified_base 6: mod_base = OTHER; note = 2'O-methyl uridine
  modified_base 7: mod_base = OTHER; note = 2'-fluoro guanosine
  modified_base 8: mod_base = OTHER; note = 2'O-methyl adenosine
  modified_base 9: mod_base = OTHER; note = 2'-fluoro cytidine
  modified_base 10: mod_base = OTHER; note = 2'-fluoro uridine
  modified_base 11: mod_base = OTHER; note = 2'-fluoro uridine
  modified_base 12: mod_base = OTHER; note = 2'O-methyl uridine
  modified_base 13: mod_base = OTHER; note = 2'O-methyl cytidine
  modified_base 14: mod_base = OTHER; note = 2'O-methyl guanosine
  modified_base 15: mod_base = OTHER; note = 2'O-methyl guanosine
  modified_base 16: mod_base = OTHER; note = 2'O-methyl uridine
  modified_base 17: mod_base = OTHER; note = 2'O-methyl cytidine
  modified_base 18: mod_base = OTHER; note = 2'O-methyl cytidine
  modified_base 19: mod_base = OTHER; note = 2'O-methyl adenosine
  modified_base 20: mod_base = OTHER; note = 2'O-methyl adenosine
  modified_base 21: mod_base = OTHER; note = 2'O-methyl adenosine 6-(5-(((2R,3R,4R,5R,6R)-3-acetamido-4,5-dihydroxy-6-(hydrox ymethyl)tetrahydro-2H-pyran-2-yl)oxy)pentanamido)-N-(6-(4-( hydroxymethyl)-4-(methoxymethyl)piperidin-1-yl)-6-oxohexyl) hexanamide-phosphorothioate-6-(5-(((2R,3R,4R,5R,6R)-3-aceta mido-4,5-dihydroxy-6-(hydroxymethyl)tetrahydro-2H-pyran-2-y l)oxy)pentanamido)-N-(6-(4-(hydroxymethyl)-4-(methoxymethyl )piperidin-1-yl)-6-oxohexyl)hexanamide-phosphorothioate-6-( 5-(((2R,3R,4R,5R,6R)-3-acetamido-4,5-dihydroxy-6-(hydroxyme thyl)tetrahydro-2H-pyran-2-yl)oxy)pentanamido)-N-(6-(4-(hyd roxymethyl)-4-(methoxymethyl)piperidin-1-yl)-6-oxohexyl)hex anamide
gtgtctgactttcggtccaaa

SEQ ID NO: 2175 - RNA, 21 nt, synthetic construct
  source 1..21: mol_type = other RNA
  modified_base 1: mod_base = OTHER; note = 2'O-methyl guanosine phosphorothioate
  modified_base 2: mod_base = OTHER; note = 2'O-methyl uridine phosphorothioate
  modified_base 3: mod_base = OTHER; note = 2'O-methyl guanosine
  modified_base 4: mod_base = OTHER; note = 2'O-methyl uridine
  modified_base 5: mod_base = OTHER; note = 2'O-methyl cytidine
  modified_base 6: mod_base = OTHER; note = 2'O-methyl uridine
  modified_base 7: mod_base = OTHER; note = 2'-fluoro guanosine
  modified_base 8: mod_base = OTHER; note = 2'O-methyl adenosine
  modified_base 9: mod_base = OTHER; note = 2'-fluoro cytidine
  modified_base 10: mod_base = OTHER; note = 2'-fluoro uridine
  modified_base 11: mod_base = OTHER; note = 2'-fluoro uridine
  modified_base 12: mod_base = OTHER; note = 2'O-methyl uridine
  modified_base 13: mod_base = OTHER; note = 2'O-methyl cytidine
  modified_base 14: mod_base = OTHER; note = 2'O-methyl guanosine
  modified_base 15: mod_base = OTHER; note = 2'O-methyl guanosine
  modified_base 16: mod_base = OTHER; note = 2'O-methyl uridine
  modified_base 17: mod_base = OTHER; note = 2'O-methyl cytidine
  modified_base 18: mod_base = OTHER; note = 2'O-methyl cytidine
  modified_base 19: mod_base = OTHER; note = 2'O-methyl adenosine
  modified_base 20: mod_base = OTHER; note = 2'O-methyl adenosine
  modified_base 21: mod_base = OTHER; note = 2'O-methyl adenosine 6-(5-(((2R,3R,4R,5R,6R)-3-acetamido-4,5-dihydroxy-6-(hydrox ymethyl)tetrahydro-2H-pyran-2-yl)oxy)pentanamido)-N-(6-(4-( hydroxymethyl)-4-(methoxymethyl)piperidin-1-yl)-6-oxohexyl) hexanamide-phosphorothioate-6-(5-(((2R,3R,4R,5R,6R)-3-aceta mido-4,5-dihydroxy-6-(hydroxymethyl)tetrahydro-2H-pyran-2-y l)oxy)pentanamido)-N-(6-(4-(hydroxymethyl)-4-(methoxymethyl )piperidin-1-yl)-6-oxohexyl)hexanamide-phosphorothioate-6-( 5-(((2R,3R,4R,5R,6R)-3-acetamido-4,5-dihydroxy-6-(hydroxyme thyl)tetrahydro-2H-pyran-2-yl)oxy)pentanamido)-N-(6-(4-(hyd roxymethyl)-4-(methoxymethyl)piperidin-1-yl)-6-oxohexyl)hex anamide
gtgtctgactttcggtccaaa

SEQ ID NO: 2176 - RNA, 21 nt, synthetic construct
  source 1..21: mol_type = other RNA
  modified_base 1: mod_base = OTHER; note = 2'O-methyl guanosine phosphorothioate
  modified_base 2: mod_base = OTHER; note = 2'O-methyl uridine phosphorothioate
  modified_base 3: mod_base = OTHER; note = 2'O-methyl guanosine
  modified_base 4: mod_base = OTHER; note = 2'O-methyl uridine
  modified_base 5: mod_base = OTHER; note = 2'O-methyl cytidine
  modified_base 6: mod_base = OTHER; note = 2'O-methyl uridine
  modified_base 7: mod_base = OTHER; note = 2'-fluoro guanosine
  modified_base 8: mod_base = OTHER; note = 2'O-methyl adenosine
  modified_base 9: mod_base = OTHER; note = 2'-fluoro cytidine
  modified_base 10: mod_base = OTHER; note = 2'-fluoro uridine
  modified_base 11: mod_base = OTHER; note = 2'-fluoro uridine
  modified_base 12: mod_base = OTHER; note = 2'O-methyl uridine
  modified_base 13: mod_base = OTHER; note = 2'O-methyl cytidine
  modified_base 14: mod_base = OTHER; note = 2'O-methyl guanosine
  modified_base 15: mod_base = OTHER; note = 2'O-methyl guanosine
  modified_base 16: mod_base = OTHER; note = 2'O-methyl uridine
  modified_base 17: mod_base = OTHER; note = 2'O-methyl cytidine
  modified_base 18: mod_base = OTHER; note = 2'O-methyl cytidine
  modified_base 19: mod_base = OTHER; note = 2'O-methyl adenosine
  modified_base 20: mod_base = OTHER; note = 2'O-methyl adenosine
  modified_base 21: mod_base = OTHER; note = 2'O-methyl adenosine 6-(5-(((2R,3R,4R,5R,6R)-3-acetamido-4,5-dihydroxy-6-(hydrox ymethyl)tetrahydro-2H-pyran-2-yl)oxy)pentanamido)-N-(6-(4-( hydroxymethyl)-4-(methoxymethyl)piperidin-1-yl)-6-oxohexyl) hexanamide-phosphorothioate-6-(5-(((2R,3R,4R,5R,6R)-3-aceta mido-4,5-dihydroxy-6-(hydroxymethyl)tetrahydro-2H-pyran-2-y l)oxy)pentanamido)-N-(6-(4-(hydroxymethyl)-4-(methoxymethyl )piperidin-1-yl)-6-oxohexyl)hexanamide-phosphorothioate-6-( 5-(((2R,3R,4R,5R,6R)-3-acetamido-4,5-dihydroxy-6-(hydroxyme thyl)tetrahydro-2H-pyran-2-yl)oxy)pentanamido)-N-(6-(4-(hyd roxymethyl)-4-(methoxymethyl)piperidin-1-yl)-6-oxohexyl)hex anamide
gtgtctgactttcggtccaaa

SEQ ID NO: 2177 - RNA, 21 nt, synthetic construct
  source 1..21: mol_type = other RNA
  modified_base 1: mod_base = OTHER; note = 2'O-methyl uridine phosphorothioate
  modified_base 2: mod_base = OTHER; note = 2'O-methyl cytidine phosphorothioate
  modified_base 3: mod_base = OTHER; note = 2'O-methyl cytidine
  modified_base 4: mod_base = OTHER; note = 2'O-methyl adenosine
  modified_base 5: mod_base = OTHER; note = 2'O-methyl adenosine
  modified_base 6: mod_base = OTHER; note = 2'O-methyl adenosine
  modified_base 7: mod_base = OTHER; note = 2'-fluoro guanosine
  modified_base 8: mod_base = OTHER; note = 2'O-methyl adenosine
  modified_base 9: mod_base = OTHER; note = 2'-fluoro cytidine
  modified_base 10: mod_base = OTHER; note = 2'-fluoro guanosine
  modified_base 11: mod_base = OTHER; note = 2'-fluoro adenosine
  modified_base 12: mod_base = OTHER; note = 2'O-methyl adenosine
  modified_base 13: mod_base = OTHER; note = 2'O-methyl guanosine
  modified_base 14: mod_base = OTHER; note = 2'O-methyl uridine
  modified_base 15: mod_base = OTHER; note = 2'O-methyl cytidine
  modified_base 16: mod_base = OTHER; note = 2'O-methyl guanosine
  modified_base 17: mod_base = OTHER; note = 2'O-methyl uridine
  modified_base 18: mod_base = OTHER; note = 2'O-methyl guanosine
  modified_base 19: mod_base = OTHER; note = 2'O-methyl guanosine
  modified_base 20: mod_base = OTHER; note = 2'O-methyl adenosine
  modified_base 21: mod_base = OTHER; note = 2'O-methyl uridine 6-(5-(((2R,3R,4R,5R,6R)-3-acetamido-4,5-dihydroxy-6-(hydrox ymethyl)tetrahydro-2H-pyran-2-yl)oxy)pentanamido)-N-(6-(4-( hydroxymethyl)-4-(methoxymethyl)piperidin-1-yl)-6-oxohexyl) hexanamide-phosphorothioate-6-(5-(((2R,3R,4R,5R,6R)-3-aceta mido-4,5-dihydroxy-6-(hydroxymethyl)tetrahydro-2H-pyran-2-y l)oxy)pentanamido)-N-(6-(4-(hydroxymethyl)-4-(methoxymethyl )piperidin-1-yl)-6-oxohexyl)hexanamide-phosphorothioate-6-( 5-(((2R,3R,4R,5R,6R)-3-acetamido-4,5-dihydroxy-6-(hydroxyme thyl)tetrahydro-2H-pyran-2-yl)oxy)pentanamido)-N-(6-(4-(hyd roxymethyl)-4-(methoxymethyl)piperidin-1-yl)-6-oxohexyl)hex anamide
tccaaagacgaagtcgtggat

SEQ ID NO: 2178 - RNA, 21 nt, synthetic construct
  source 1..21: mol_type = other RNA
  modified_base 1: mod_base = OTHER; note = 2'O-methyl uridine phosphorothioate
  modified_base 2: mod_base = OTHER; note = 2'O-methyl cytidine phosphorothioate
  modified_base 3: mod_base = OTHER; note = 2'O-methyl cytidine
  modified_base 4: mod_base = OTHER; note = 2'O-methyl adenosine
  modified_base 5: mod_base = OTHER; note = 2'O-methyl adenosine
  modified_base 6: mod_base = OTHER; note = 2'O-methyl adenosine
  modified_base 7: mod_base = OTHER; note = 2'-fluoro guanosine
  modified_base 8: mod_base = OTHER; note = 2'O-methyl adenosine
  modified_base 9: mod_base = OTHER; note = 2'-fluoro cytidine
  modified_base 10: mod_base = OTHER; note = 2'-fluoro guanosine
  modified_base 11: mod_base = OTHER; note = 2'-fluoro adenosine
  modified_base 12: mod_base = OTHER; note = 2'O-methyl adenosine
  modified_base 13: mod_base = OTHER; note = 2'O-methyl guanosine
  modified_base 14: mod_base = OTHER; note = 2'O-methyl uridine
  modified_base 15: mod_base = OTHER; note = 2'O-methyl cytidine
  modified_base 16: mod_base = OTHER; note = 2'O-methyl guanosine
  modified_base 17: mod_base = OTHER; note = 2'O-methyl uridine
  modified_base 18: mod_base = OTHER; note = 2'O-methyl guanosine
  modified_base 19: mod_base = OTHER; note = 2'O-methyl guanosine
  modified_base 20: mod_base = OTHER; note = 2'O-methyl adenosine
  modified_base 21: mod_base = OTHER; note = 2'O-methyl uridine 6-(5-(((2R,3R,4R,5R,6R)-3-acetamido-4,5-dihydroxy-6-(hydrox ymethyl)tetrahydro-2H-pyran-2-yl)oxy)pentanamido)-N-(6-(4-( hydroxymethyl)-4-(methoxymethyl)piperidin-1-yl)-6-oxohexyl) hexanamide-phosphorothioate-6-(5-(((2R,3R,4R,5R,6R)-3-aceta mido-4,5-dihydroxy-6-(hydroxymethyl)tetrahydro-2H-pyran-2-y l)oxy)pentanamido)-N-(6-(4-(hydroxymethyl)-4-(methoxymethyl )piperidin-1-yl)-6-oxohexyl)hexanamide-phosphorothioate-6-( 5-(((2R,3R,4R,5R,6R)-3-acetamido-4,5-dihydroxy-6-(hydroxyme thyl)tetrahydro-2H-pyran-2-yl)oxy)pentanamido)-N-(6-(4-(hyd roxymethyl)-4-(methoxymethyl)piperidin-1-yl)-6-oxohexyl)hex anamide
tccaaagacgaagtcgtggat

SEQ ID NO: 2179 - RNA, 21 nt, synthetic construct
  source 1..21: mol_type = other RNA
  modified_base 1: mod_base = OTHER; note = 2'O-methyl uridine phosphorothioate
  modified_base 2: mod_base = OTHER; note = 2'O-methyl cytidine phosphorothioate
  modified_base 3: mod_base = OTHER; note = 2'O-methyl cytidine
  modified_base 4: mod_base = OTHER; note = 2'O-methyl adenosine
  modified_base 5: mod_base = OTHER; note = 2'O-methyl adenosine
  modified_base 6: mod_base = OTHER; note = 2'O-methyl adenosine
  modified_base 7: mod_base = OTHER; note = 2'-fluoro guanosine
  modified_base 8: mod_base = OTHER; note = 2'O-methyl adenosine
  modified_base 9: mod_base = OTHER; note = 2'-fluoro cytidine
  modified_base 10: mod_base = OTHER; note = 2'-fluoro guanosine
  modified_base 11: mod_base = OTHER; note = 2'-fluoro adenosine
  modified_base 12: mod_base = OTHER; note = 2'O-methyl adenosine
  modified_base 13: mod_base = OTHER; note = 2'O-methyl guanosine
  modified_base 14: mod_base = OTHER; note = 2'O-methyl uridine
  modified_base 15: mod_base = OTHER; note = 2'O-methyl cytidine
  modified_base 16: mod_base = OTHER; note = 2'O-methyl guanosine
  modified_base 17: mod_base = OTHER; note = 2'O-methyl uridine
  modified_base 18: mod_base = OTHER; note = 2'O-methyl guanosine
  modified_base 19: mod_base = OTHER; note = 2'O-methyl guanosine
  modified_base 20: mod_base = OTHER; note = 2'O-methyl adenosine
  modified_base 21: mod_base = OTHER; note = 2'O-methyl uridine 6-(5-(((2R,3R,4R,5R,6R)-3-acetamido-4,5-dihydroxy-6-(hydrox ymethyl)tetrahydro-2H-pyran-2-yl)oxy)pentanamido)-N-(6-(4-( hydroxymethyl)-4-(methoxymethyl)piperidin-1-yl)-6-oxohexyl) hexanamide-phosphorothioate-6-(5-(((2R,3R,4R,5R,6R)-3-aceta mido-4,5-dihydroxy-6-(hydroxymethyl)tetrahydro-2H-pyran-2-y l)oxy)pentanamido)-N-(6-(4-(hydroxymethyl)-4-(methoxymethyl )piperidin-1-yl)-6-oxohexyl)hexanamide-phosphorothioate-6-( 5-(((2R,3R,4R,5R,6R)-3-acetamido-4,5-dihydroxy-6-(hydroxyme thyl)tetrahydro-2H-pyran-2-yl)oxy)pentanamido)-N-(6-(4-(hyd roxymethyl)-4-(methoxymethyl)piperidin-1-yl)-6-oxohexyl)hex anamide
tccaaagacgaagtcgtggat

SEQ ID NO: 2180 - RNA, 21 nt, synthetic construct
  source 1..21: mol_type = other RNA
  modified_base 1: mod_base = OTHER; note = 2'O-methyl adenosine phosphorothioate
  modified_base 2: mod_base = OTHER; note = 2'O-methyl uridine phosphorothioate
  modified_base 3: mod_base = OTHER; note = 2'O-methyl guanosine
  modified_base 4: mod_base = OTHER; note = 2'O-methyl cytidine
  modified_base 5: mod_base = OTHER; note = 2'O-methyl cytidine
  modified_base 6: mod_base = OTHER; note = 2'O-methyl adenosine
  modified_base 7: mod_base = OTHER; note = 2'-fluoro adenosine
  modified_base 8: mod_base = OTHER; note = 2'O-methyl adenosine
  modified_base 9: mod_base = OTHER; note = 2'-fluoro adenosine
  modified_base 10: mod_base = OTHER; note = 2'-fluoro cytidine
  modified_base 11: mod_base = OTHER; note = 2'-fluoro adenosine
  modified_base 12: mod_base = OTHER; note = 2'O-methyl adenosine
  modified_base 13: mod_base = OTHER; note = 2'O-methyl cytidine
  modified_base 14: mod_base = OTHER; note = 2'O-methyl cytidine
  modified_base 15: mod_base = OTHER; note = 2'O-methyl adenosine
  modified_base 16: mod_base = OTHER; note = 2'O-methyl uridine
  modified_base 17: mod_base = OTHER; note = 2'O-methyl cytidine
  modified_base 18: mod_base = OTHER; note = 2'O-methyl adenosine
  modified_base 19: mod_base = OTHER; note = 2'O-methyl cytidine
  modified_base 20: mod_base = OTHER; note = 2'O-methyl cytidine
  modified_base 21: mod_base = OTHER; note = 2'O-methyl guanosine 6-(5-(((2R,3R,4R,5R,6R)-3-acetamido-4,5-dihydroxy-6-(hydrox ymethyl)tetrahydro-2H-pyran-2-yl)oxy)pentanamido)-N-(6-(4-( hydroxymethyl)-4-(methoxymethyl)piperidin-1-yl)-6-oxohexyl) hexanamide-phosphorothioate-6-(5-(((2R,3R,4R,5R,6R)-3-aceta mido-4,5-dihydroxy-6-(hydroxymethyl)tetrahydro-2H-pyran-2-y l)oxy)pentanamido)-N-(6-(4-(hydroxymethyl)-4-(methoxymethyl )piperidin-1-yl)-6-oxohexyl)hexanamide-phosphorothioate-6-( 5-(((2R,3R,4R,5R,6R)-3-acetamido-4,5-dihydroxy-6-(hydroxyme thyl)tetrahydro-2H-pyran-2-yl)oxy)pentanamido)-N-(6-(4-(hyd roxymethyl)-4-(methoxymethyl)piperidin-1-yl)-6-oxohexyl)hex anamide
atgccaaaacaaccatcaccg

SEQ ID NO: 2181 - RNA, 21 nt, synthetic construct
  source 1..21: mol_type = other RNA
  modified_base 1: mod_base = OTHER; note = 2'O-methyl adenosine phosphorothioate
  modified_base 2: mod_base = OTHER; note = 2'O-methyl uridine phosphorothioate
  modified_base 3: mod_base = OTHER; note = 2'O-methyl guanosine
  modified_base 4: mod_base = OTHER; note = 2'O-methyl cytidine
  modified_base 5: mod_base = OTHER; note = 2'O-methyl cytidine
  modified_base 6: mod_base = OTHER; note = 2'O-methyl adenosine
  modified_base 7: mod_base = OTHER; note = 2'-fluoro adenosine
  modified_base 8: mod_base = OTHER; note = 2'O-methyl adenosine
  modified_base 9: mod_base = OTHER; note = 2'-fluoro adenosine
  modified_base 10: mod_base = OTHER; note = 2'-fluoro cytidine
  modified_base 11: mod_base = OTHER; note = 2'-fluoro adenosine
  modified_base 12: mod_base = OTHER; note = 2'O-methyl adenosine
  modified_base 13: mod_base = OTHER; note = 2'O-methyl cytidine
  modified_base 14: mod_base = OTHER; note = 2'O-methyl cytidine
  modified_base 15: mod_base = OTHER; note = 2'O-methyl adenosine
  modified_base 16: mod_base = OTHER; note = 2'O-methyl uridine
  modified_base 17: mod_base = OTHER; note = 2'O-methyl cytidine
  modified_base 18: mod_base = OTHER; note = 2'O-methyl adenosine
  modified_base 19: mod_base = OTHER; note = 2'O-methyl cytidine
  modified_base 20: mod_base = OTHER; note = 2'O-methyl cytidine
  modified_base 21: mod_base = OTHER; note = 2'O-methyl guanosine 6-(5-(((2R,3R,4R,5R,6R)-3-acetamido-4,5-dihydroxy-6-(hydrox ymethyl)tetrahydro-2H-pyran-2-yl)oxy)pentanamido)-N-(6-(4-( hydroxymethyl)-4-(methoxymethyl)piperidin-1-yl)-6-oxohexyl) hexanamide-phosphorothioate-6-(5-(((2R,3R,4R,5R,6R)-3-aceta mido-4,5-dihydroxy-6-(hydroxymethyl)tetrahydro-2H-pyran-2-y l)oxy)pentanamido)-N-(6-(4-(hydroxymethyl)-4-(methoxymethyl )piperidin-1-yl)-6-oxohexyl)hexanamide-phosphorothioate-6-( 5-(((2R,3R,4R,5R,6R)-3-acetamido-4,5-dihydroxy-6-(hydroxyme thyl)tetrahydro-2H-pyran-2-yl)oxy)pentanamido)-N-(6-(4-(hyd roxymethyl)-4-(methoxymethyl)piperidin-1-yl)-6-oxohexyl)hex anamide
atgccaaaacaaccatcaccg

SEQ ID NO: 2182 - RNA, 21 nt, synthetic construct
  source 1..21: mol_type = other RNA
  modified_base 1: mod_base = OTHER; note = 2'O-methyl adenosine phosphorothioate
  modified_base 2: mod_base = OTHER; note = 2'O-methyl uridine phosphorothioate
  modified_base 3: mod_base = OTHER; note = 2'O-methyl guanosine
  modified_base 4: mod_base = OTHER; note = 2'O-methyl cytidine
  modified_base 5: mod_base = OTHER; note = 2'O-methyl cytidine
  modified_base 6: mod_base = OTHER; note = 2'O-methyl adenosine
  modified_base 7: mod_base = OTHER; note = 2'-fluoro adenosine
  modified_base 8: mod_base = OTHER; note = 2'O-methyl adenosine
  modified_base 9: mod_base = OTHER; note = 2'-fluoro adenosine
  modified_base 10: mod_base = OTHER; note = 2'-fluoro cytidine
  modified_base 11: mod_base = OTHER; note = 2'-fluoro adenosine
  modified_base 12: mod_base = OTHER; note = 2'O-methyl adenosine
  modified_base 13: mod_base = OTHER; note = 2'O-methyl cytidine
  modified_base 14: mod_base = OTHER; note = 2'O-methyl cytidine
  modified_base 15: mod_base = OTHER; note = 2'O-methyl adenosine
  modified_base 16: mod_base = OTHER; note = 2'O-methyl uridine
  modified_base 17: mod_base = OTHER; note = 2'O-methyl cytidine
  modified_base 18: mod_base = OTHER; note = 2'O-methyl adenosine
  modified_base 19: mod_base = OTHER; note = 2'O-methyl cytidine
  modified_base 20: mod_base = OTHER; note = 2'O-methyl cytidine
  modified_base 21: mod_base = OTHER; note = 2'O-methyl guanosine 6-(5-(((2R,3R,4R,5R,6R)-3-acetamido-4,5-dihydroxy-6-(hydrox ymethyl)tetrahydro-2H-pyran-2-yl)oxy)pentanamido)-N-(6-(4-( hydroxymethyl)-4-(methoxymethyl)piperidin-1-yl)-6-oxohexyl) hexanamide-phosphorothioate-6-(5-(((2R,3R,4R,5R,6R)-3-aceta mido-4,5-dihydroxy-6-(hydroxymethyl)tetrahydro-2H-pyran-2-y l)oxy)pentanamido)-N-(6-(4-(hydroxymethyl)-4-(methoxymethyl )piperidin-1-yl)-6-oxohexyl)hexanamide-phosphorothioate-6-( 5-(((2R,3R,4R,5R,6R)-3-acetamido-4,5-dihydroxy-6-(hydroxyme thyl)tetrahydro-2H-pyran-2-yl)oxy)pentanamido)-N-(6-(4-(hyd roxymethyl)-4-(methoxymethyl)piperidin-1-yl)-6-oxohexyl)hex anamide
atgccaaaacaaccatcaccg

SEQ ID NO: 2183 - RNA, 21 nt, synthetic construct
  source 1..21: mol_type = other RNA
  modified_base 1: mod_base = OTHER; note = 2'O-methyl guanosine phosphorothioate
  modified_base 2: mod_base = OTHER; note = 2'O-methyl adenosine phosphorothioate
  modified_base 3: mod_base = OTHER; note = 2'O-methyl adenosine
  modified_base 4: mod_base = OTHER; note = 2'O-methyl guanosine
  modified_base 5: mod_base = OTHER; note = 2'O-methyl uridine
  modified_base 6: mod_base = OTHER; note = 2'O-methyl cytidine
  modified_base 7: mod_base = OTHER; note = 2'-fluoro guanosine
  modified_base 8: mod_base = OTHER; note = 2'O-methyl uridine
  modified_base 9: mod_base = OTHER; note = 2'-fluoro guanosine
  modified_base 10: mod_base = OTHER; note = 2'-fluoro guanosine
  modified_base 11: mod_base = OTHER; note = 2'-fluoro adenosine
  modified_base 12: mod_base = OTHER; note = 2'O-methyl uridine
  modified_base 13: mod_base = OTHER; note = 2'O-methyl guanosine
  modified_base 14: mod_base = OTHER; note = 2'O-methyl cytidine
  modified_base 15: mod_base = OTHER; note = 2'O-methyl cytidine
  modified_base 16: mod_base = OTHER; note = 2'O-methyl uridine
  modified_base 17: mod_base = OTHER; note = 2'O-methyl uridine
  modified_base 18: mod_base = OTHER; note = 2'O-methyl guanosine
  modified_base 19: mod_base = OTHER; note = 2'O-methyl guanosine
  modified_base 20: mod_base = OTHER; note = 2'O-methyl uridine
  modified_base 21: mod_base = OTHER; note = 2'O-methyl adenosine 6-(5-(((2R,3R,4R,5R,6R)-3-acetamido-4,5-dihydroxy-6-(hydrox ymethyl)tetrahydro-2H-pyran-2-yl)oxy)pentanamido)-N-(6-(4-( hydroxymethyl)-4-(methoxymethyl)piperidin-1-yl)-6-oxohexyl) hexanamide-phosphorothioate-6-(5-(((2R,3R,4R,5R,6R)-3-aceta mido-4,5-dihydroxy-6-(hydroxymethyl)tetrahydro-2H-pyran-2-y l)oxy)pentanamido)-N-(6-(4-(hydroxymethyl)-4-(methoxymethyl )piperidin-1-yl)-6-oxohexyl)hexanamide-phosphorothioate-6-( 5-(((2R,3R,4R,5R,6R)-3-acetamido-4,5-dihydroxy-6-(hydroxyme thyl)tetrahydro-2H-pyran-2-yl)oxy)pentanamido)-N-(6-(4-(hyd roxymethyl)-4-(methoxymethyl)piperidin-1-yl)-6-oxohexyl)hex anamide
gaagtcgtggatgccttggta

SEQ ID NO: 2184 - RNA, 21 nt, synthetic construct
  source 1..21: mol_type = other RNA
  modified_base 1: mod_base = OTHER; note = 2'O-methyl guanosine phosphorothioate
  modified_base 2: mod_base = OTHER; note = 2'O-methyl adenosine phosphorothioate
  modified_base 3: mod_base = OTHER; note = 2'O-methyl adenosine
  modified_base 4: mod_base = OTHER; note = 2'O-methyl guanosine
  modified_base 5: mod_base = OTHER; note = 2'O-methyl uridine
  modified_base 6: mod_base = OTHER; note = 2'O-methyl cytidine
  modified_base 7: mod_base = OTHER; note = 2'-fluoro guanosine
  modified_base 8: mod_base = OTHER; note = 2'O-methyl uridine
  modified_base 9: mod_base = OTHER; note = 2'-fluoro guanosine
  modified_base 10: mod_base = OTHER; note = 2'-fluoro guanosine
  modified_base 11: mod_base = OTHER; note = 2'-fluoro adenosine
  modified_base 12: mod_base = OTHER; note = 2'O-methyl uridine
  modified_base 13: mod_base = OTHER; note = 2'O-methyl guanosine
  modified_base 14: mod_base = OTHER; note = 2'O-methyl cytidine
  modified_base 15: mod_base = OTHER; note = 2'O-methyl cytidine
  modified_base 16: mod_base = OTHER; note = 2'O-methyl uridine
  modified_base 17: mod_base = OTHER; note = 2'O-methyl uridine
  modified_base 18: mod_base = OTHER; note = 2'O-methyl guanosine
  modified_base 19: mod_base = OTHER; note = 2'O-methyl guanosine
  modified_base 20: mod_base = OTHER; note = 2'O-methyl uridine
  modified_base 21: mod_base = OTHER; note = 2'O-methyl adenosine 6-(5-(((2R,3R,4R,5R,6R)-3-acetamido-4,5-dihydroxy-6-(hydrox ymethyl)tetrahydro-2H-pyran-2-yl)oxy)pentanamido)-N-(6-(4-( hydroxymethyl)-4-(methoxymethyl)piperidin-1-yl)-6-oxohexyl) hexanamide-phosphorothioate-6-(5-(((2R,3R,4R,5R,6R)-3-aceta mido-4,5-dihydroxy-6-(hydroxymethyl)tetrahydro-2H-pyran-2-y l)oxy)pentanamido)-N-(6-(4-(hydroxymethyl)-4-(methoxymethyl )piperidin-1-yl)-6-oxohexyl)hexanamide-phosphorothioate-6-( 5-(((2R,3R,4R,5R,6R)-3-acetamido-4,5-dihydroxy-6-(hydroxyme thyl)tetrahydro-2H-pyran-2-yl)oxy)pentanamido)-N-(6-(4-(hyd roxymethyl)-4-(methoxymethyl)piperidin-1-yl)-6-oxohexyl)hex anamide
gaagtcgtggatgccttggta

SEQ ID NO: 2185 - RNA, 21 nt, synthetic construct
  source 1..21: mol_type = other RNA
  modified_base 1: mod_base = OTHER; note = 2'O-methyl guanosine phosphorothioate
  modified_base 2: mod_base = OTHER; note = 2'O-methyl adenosine phosphorothioate
  modified_base 3: mod_base = OTHER; note = 2'O-methyl adenosine
  modified_base 4: mod_base = OTHER; note = 2'O-methyl guanosine
  modified_base 5: mod_base = OTHER; note = 2'O-methyl uridine
  modified_base 6: mod_base = OTHER; note = 2'O-methyl cytidine
  modified_base 7: mod_base = OTHER; note = 2'-fluoro guanosine
  modified_base 8: mod_base = OTHER; note = 2'O-methyl uridine
  modified_base 9: mod_base = OTHER; note = 2'-fluoro guanosine
  modified_base 10: mod_base = OTHER; note = 2'-fluoro guanosine
  modified_base 11: mod_base = OTHER; note = 2'-fluoro adenosine
  modified_base 12: mod_base = OTHER; note = 2'O-methyl uridine
  modified_base 13: mod_base = OTHER; note = 2'O-methyl guanosine
  modified_base 14: mod_base = OTHER; note = 2'O-methyl cytidine
  modified_base 15: mod_base = OTHER; note = 2'O-methyl cytidine
  modified_base 16: mod_base = OTHER; note = 2'O-methyl uridine
  modified_base 17: mod_base = OTHER; note = 2'O-methyl uridine
  modified_base 18: mod_base = OTHER; note = 2'O-methyl guanosine
  modified_base 19: mod_base = OTHER; note = 2'O-methyl guanosine
  modified_base 20: mod_base = OTHER; note = 2'O-methyl uridine
  modified_base 21: mod_base = OTHER; note = 2'O-methyl adenosine 6-(5-(((2R,3R,4R,5R,6R)-3-acetamido-4,5-dihydroxy-6-(hydrox ymethyl)tetrahydro-2H-pyran-2-yl)oxy)pentanamido)-N-(6-(4-( hydroxymethyl)-4-(methoxymethyl)piperidin-1-yl)-6-oxohexyl) hexanamide-phosphorothioate-6-(5-(((2R,3R,4R,5R,6R)-3-aceta mido-4,5-dihydroxy-6-(hydroxymethyl)tetrahydro-2H-pyran-2-y l)oxy)pentanamido)-N-(6-(4-(hydroxymethyl)-4-(methoxymethyl )piperidin-1-yl)-6-oxohexyl)hexanamide-phosphorothioate-6-( 5-(((2R,3R,4R,5R,6R)-3-acetamido-4,5-dihydroxy-6-(hydroxyme thyl)tetrahydro-2H-pyran-2-yl)oxy)pentanamido)-N-(6-(4-(hyd roxymethyl)-4-(methoxymethyl)piperidin-1-yl)-6-oxohexyl)hex anamide
gaagtcgtggatgccttggta

SEQ ID NO: 2186 - RNA, 21 nt, synthetic construct
  source 1..21: mol_type = other RNA
  modified_base 1: mod_base = OTHER; note = 2'O-methyl uridine phosphorothioate
  modified_base 2: mod_base = OTHER; note = 2'O-methyl cytidine phosphorothioate
  modified_base 3: mod_base = OTHER; note = 2'O-methyl guanosine
  modified_base 4: mod_base = OTHER; note = 2'O-methyl uridine
  modified_base 5: mod_base = OTHER; note = 2'O-methyl guanosine
  modified_base 6: mod_base = OTHER; note = 2'O-methyl guanosine
  modified_base 7: mod_base = OTHER; note = 2'-fluoro adenosine
  modified_base 8: mod_base = OTHER; note = 2'O-methyl uridine
  modified_base 9: mod_base = OTHER; note = 2'-fluoro guanosine
  modified_base 10: mod_base = OTHER; note = 2'-fluoro cytidine
  modified_base 11: mod_base = OTHER; note = 2'-fluoro cytidine
  modified_base 12: mod_base = OTHER; note = 2'O-methyl uridine
  modified_base 13: mod_base = OTHER; note = 2'O-methyl uridine
  modified_base 14: mod_base = OTHER; note = 2'O-methyl guanosine
  modified_base 15: mod_base = OTHER; note = 2'O-methyl guanosine
  modified_base 16: mod_base = OTHER; note = 2'O-methyl uridine
  modified_base 17: mod_base = OTHER; note = 2'O-methyl adenosine
  modified_base 18: mod_base = OTHER; note = 2'O-methyl uridine
  modified_base 19: mod_base = OTHER; note = 2'O-methyl guanosine
  modified_base 20: mod_base = OTHER; note = 2'O-methyl uridine
  modified_base 21: mod_base = OTHER; note = 2'O-methyl uridine 6-(5-(((2R,3R,4R,5R,6R)-3-acetamido-4,5-dihydroxy-6-(hydrox ymethyl)tetrahydro-2H-pyran-2-yl)oxy)pentanamido)-N-(6-(4-( hydroxymethyl)-4-(methoxymethyl)piperidin-1-yl)-6-oxohexyl) hexanamide-phosphorothioate-6-(5-(((2R,3R,4R,5R,6R)-3-aceta mido-4,5-dihydroxy-6-(hydroxymethyl)tetrahydro-2H-pyran-2-y l)oxy)pentanamido)-N-(6-(4-(hydroxymethyl)-4-(methoxymethyl )piperidin-1-yl)-6-oxohexyl)hexanamide-phosphorothioate-6-( 5-(((2R,3R,4R,5R,6R)-3-acetamido-4,5-dihydroxy-6-(hydroxyme thyl)tetrahydro-2H-pyran-2-yl)oxy)pentanamido)-N-(6-(4-(hyd roxymethyl)-4-(methoxymethyl)piperidin-1-yl)-6-oxohexyl)hex anamide
tcgtggatgccttggtatgtt

SEQ ID NO: 2187 - RNA, 21 nt, synthetic construct
  source 1..21: mol_type = other RNA
  modified_base 1: mod_base = OTHER; note = 2'O-methyl adenosine phosphorothioate
  modified_base 2: mod_base = OTHER; note = 2'O-methyl guanosine phosphorothioate
  modified_base 3: mod_base = OTHER; note = 2'O-methyl uridine
  modified_base 4: mod_base = OTHER; note = 2'O-methyl cytidine
  modified_base 5: mod_base = OTHER; note = 2'O-methyl guanosine
  modified_base 6: mod_base = OTHER; note = 2'O-methyl uridine
  modified_base 7: mod_base = OTHER; note = 2'-fluoro guanosine
  modified_base 8: mod_base = OTHER; note = 2'O-methyl guanosine
  modified_base 9: mod_base = OTHER; note = 2'-fluoro adenosine
  modified_base 10: mod_base = OTHER; note = 2'-fluoro uridine
  modified_base 11: mod_base = OTHER; note = 2'-fluoro guanosine
  modified_base 12: mod_base = OTHER; note = 2'O-methyl cytidine
  modified_base 13: mod_base = OTHER; note = 2'O-methyl cytidine
  modified_base 14: mod_base = OTHER; note = 2'O-methyl uridine
  modified_base 15: mod_base = OTHER; note = 2'O-methyl uridine
  modified_base 16: mod_base = OTHER; note = 2'O-methyl guanosine
  modified_base 17: mod_base = OTHER; note = 2'O-methyl guanosine
  modified_base 18: mod_base = OTHER; note = 2'O-methyl uridine
  modified_base 19: mod_base = OTHER; note = 2'O-methyl adenosine
  modified_base 20: mod_base = OTHER; note = 2'O-methyl uridine
  modified_base 21: mod_base = OTHER; note = 2'O-methyl guanosine 6-(5-(((2R,3R,4R,5R,6R)-3-acetamido-4,5-dihydroxy-6-(hydrox ymethyl)tetrahydro-2H-pyran-2-yl)oxy)pentanamido)-N-(6-(4-( hydroxymethyl)-4-(methoxymethyl)piperidin-1-yl)-6-oxohexyl) hexanamide-phosphorothioate-6-(5-(((2R,3R,4R,5R,6R)-3-aceta mido-4,5-dihydroxy-6-(hydroxymethyl)tetrahydro-2H-pyran-2-y l)oxy)pentanamido)-N-(6-(4-(hydroxymethyl)-4-(methoxymethyl )piperidin-1-yl)-6-oxohexyl)hexanamide-phosphorothioate-6-( 5-(((2R,3R,4R,5R,6R)-3-acetamido-4,5-dihydroxy-6-(hydroxyme thyl)tetrahydro-2H-pyran-2-yl)oxy)pentanamido)-N-(6-(4-(hyd roxymethyl)-4-(methoxymethyl)piperidin-1-yl)-6-oxohexyl)hex anamide
agtcgtggatgccttggtatg

SEQ ID NO: 2188 - RNA, 21 nt, synthetic construct
  source 1..21: mol_type = other RNA
  modified_base 1: mod_base = OTHER; note = 5' vinyl phosphonate 2'O-methyl cytidine phosphorothioate
  modified_base 2: mod_base = OTHER; note = 2'-fluoro adenosine phosphorothioate
  modified_base 3: mod_base = OTHER; note = 2'O-methyl guanosine
  modified_base 4: mod_base = OTHER; note = 2'O-methyl guanosine
  modified_base 5: mod_base = OTHER; note = 2'O-methyl adenosine
  modified_base 6: mod_base = OTHER; note = 2'-fluoro adenosine
  modified_base 7: mod_base = OTHER; note = 2'O-methyl cytidine
  modified_base 8: mod_base = OTHER; note = 2'O-methyl adenosine
  modified_base 9: mod_base = OTHER; note = 2'O-methyl uridine
  modified_base 10: mod_base = OTHER; note = 2'O-methyl adenosine
  modified_base 11: mod_base = OTHER; note = 2'O-methyl cytidine
  modified_base 12: mod_base = OTHER; note = 2'O-methyl cytidine
  modified_base 13: mod_base = OTHER; note = 2'O-methyl adenosine
  modified_base 14: mod_base = OTHER; note = 2'-fluoro adenosine
  modified_base 15: mod_base = OTHER; note = 2'O-methyl guanosine
  modified_base 16: mod_base = OTHER; note = 2'-fluoro guanosine
  modified_base 17: mod_base = OTHER; note = 2'O-methyl cytidine
  modified_base 18: mod_base = OTHER; note = 2'O-methyl adenosine
  modified_base 19: mod_base = OTHER; note = 2'O-methyl uridine phosphorothioate
  modified_base 20: mod_base = OTHER; note = 2'O-methyl uridine phosphorothioate
  modified_base 21: mod_base = OTHER; note = 2'O-methyl uridine
caggaacataccaaggcattt

SEQ ID NO: 2189 - RNA, 21 nt, synthetic construct
  source 1..21: mol_type = other RNA
  modified_base 1: mod_base = OTHER; note = 2'O-methyl adenosine phosphorothioate
  modified_base 2: mod_base = OTHER; note = 2'-fluoro adenosine phosphorothioate
  modified_base 3: mod_base = OTHER; note = 2'O-methyl guanosine
  modified_base 4: mod_base = OTHER; note = 2'O-methyl guanosine
  modified_base 5: mod_base = OTHER; note = 2'O-methyl adenosine
  modified_base 6: mod_base = OTHER; note = 2'-fluoro adenosine
  modified_base 7: mod_base = OTHER; note = 2'O-methyl cytidine
  modified_base 8: mod_base = OTHER; note = 2'O-methyl adenosine
  modified_base 9: mod_base = OTHER; note = 2'O-methyl uridine
  modified_base 10: mod_base = OTHER; note = 2'O-methyl adenosine
  modified_base 11: mod_base = OTHER; note = 2'O-methyl cytidine
  modified_base 12: mod_base = OTHER; note = 2'O-methyl cytidine
  modified_base 13: mod_base = OTHER; note = 2'O-methyl adenosine
  modified_base 14: mod_base = OTHER; note = 2'-fluoro adenosine
  modified_base 15: mod_base = OTHER; note = 2'O-methyl guanosine
  modified_base 16: mod_base = OTHER; note = 2'-fluoro guanosine
  modified_base 17: mod_base = OTHER; note = 2'O-methyl cytidine
  modified_base 18: mod_base = OTHER; note = 2'O-methyl adenosine
  modified_base 19: mod_base = OTHER; note = 2'O-methyl uridine phosphorothioate
  modified_base 20: mod_base = OTHER; note = 2'O-methyl uridine phosphorothioate
  modified_base 21: mod_base = OTHER; note = 2'O-methyl uridine
aaggaacataccaaggcattt

SEQ ID NO: 2190 - RNA, 21 nt, synthetic construct
  source 1..21: mol_type = other RNA
  modified_base 1: mod_base = OTHER; note = 5' vinyl phosphonate 2'O-methyl adenosine phosphorothioate
  modified_base 2: mod_base = OTHER; note = 2'-fluoro adenosine phosphorothioate
  modified_base 3: mod_base = OTHER; note = 2'O-methyl guanosine
  modified_base 4: mod_base = OTHER; note = 2'O-methyl guanosine
  modified_base 5: mod_base = OTHER; note = 2'O-methyl adenosine
  modified_base 6: mod_base = OTHER; note = 2'-fluoro adenosine
  modified_base 7: mod_base = OTHER; note = 2'O-methyl cytidine
  modified_base 8: mod_base = OTHER; note = 2'O-methyl adenosine
  modified_base 9: mod_base = OTHER; note = 2'O-methyl uridine
  modified_base 10: mod_base = OTHER; note = 2'O-methyl adenosine
  modified_base 11: mod_base = OTHER; note = 2'O-methyl cytidine
  modified_base 12: mod_base = OTHER; note = 2'O-methyl cytidine
  modified_base 13: mod_base = OTHER; note = 2'O-methyl adenosine
  modified_base 14: mod_base = OTHER; note = 2'-fluoro adenosine
  modified_base 15: mod_base = OTHER; note = 2'O-methyl guanosine
  modified_base 16: mod_base = OTHER; note = 2'-fluoro guanosine
  modified_base 17: mod_base = OTHER; note = 2'O-methyl cytidine
  modified_base 18: mod_base = OTHER; note = 2'O-methyl adenosine
  modified_base 19: mod_base = OTHER; note = 2'O-methyl uridine phosphorothioate
  modified_base 20: mod_base = OTHER; note = 2'O-methyl uridine phosphorothioate
  modified_base 21: mod_base = OTHER; note = 2'O-methyl uridine
aaggaacataccaaggcattt

SEQ ID NO: 2191 - RNA, 21 nt, synthetic construct
  source 1..21: mol_type = other RNA
  modified_base 1: mod_base = OTHER; note = 2'O-methyl uridine phosphorothioate
  modified_base 2: mod_base = OTHER; note = 2'-fluoro adenosine phosphorothioate
  modified_base 3: mod_base = OTHER; note = 2'O-methyl guanosine
  modified_base 4: mod_base = OTHER; note = 2'O-methyl guanosine
  modified_base 5: mod_base = OTHER; note = 2'O-methyl adenosine
  modified_base 6: mod_base = OTHER; note = 2'-fluoro adenosine
  modified_base 7: mod_base = OTHER; note = 2'O-methyl cytidine
  modified_base 8: mod_base = OTHER; note = 2'O-methyl adenosine
  modified_base 9: mod_base = OTHER; note = 2'O-methyl uridine
  modified_base 10: mod_base = OTHER; note = 2'O-methyl adenosine
  modified_base 11: mod_base = OTHER; note = 2'O-methyl cytidine
  modified_base 12: mod_base = OTHER; note = 2'O-methyl cytidine
  modified_base 13: mod_base = OTHER; note = 2'O-methyl adenosine
  modified_base 14: mod_base = OTHER; note = 2'-fluoro adenosine
  modified_base 15: mod_base = OTHER; note = 2'O-methyl guanosine
  modified_base 16: mod_base = OTHER; note = 2'-fluoro guanosine
  modified_base 17: mod_base = OTHER; note = 2'O-methyl cytidine
  modified_base 18: mod_base = OTHER; note = 2'O-methyl adenosine
  modified_base 19: mod_base = OTHER; note = 2'O-methyl uridine phosphorothioate
  modified_base 20: mod_base = OTHER; note = 2'O-methyl uridine phosphorothioate
  modified_base 21: mod_base = OTHER; note = 2'O-methyl uridine
taggaacataccaaggcattt

SEQ ID NO: 2192 - RNA, 21 nt, synthetic construct
  source 1..21: mol_type = other RNA
  modified_base 1: mod_base = OTHER; note = 5' vinyl phosphonate 2'O-methyl uridine phosphorothioate
  modified_base 2: mod_base = OTHER; note = 2'-fluoro adenosine phosphorothioate
  modified_base 3: mod_base = OTHER; note = 2'O-methyl guanosine
  modified_base 4: mod_base = OTHER; note = 2'O-methyl guanosine
  modified_base 5: mod_base = OTHER; note = 2'O-methyl adenosine
  modified_base 6: mod_base = OTHER; note = 2'-fluoro adenosine
  modified_base 7: mod_base = OTHER; note = 2'O-methyl cytidine
  modified_base 8: mod_base = OTHER; note = 2'O-methyl adenosine
  modified_base 9: mod_base = OTHER; note = 2'O-methyl uridine
  modified_base 10: mod_base = OTHER; note = 2'O-methyl adenosine
  modified_base 11: mod_base = OTHER; note = 2'O-methyl cytidine
  modified_base 12: mod_base = OTHER; note = 2'O-methyl cytidine
  modified_base 13: mod_base = OTHER; note = 2'O-methyl adenosine
  modified_base 14: mod_base = OTHER; note = 2'-fluoro adenosine
  modified_base 15: mod_base = OTHER; note = 2'O-methyl guanosine
  modified_base 16: mod_base = OTHER; note = 2'-fluoro guanosine
  modified_base 17: mod_base = OTHER; note = 2'O-methyl cytidine
  modified_base 18: mod_base = OTHER; note = 2'O-methyl adenosine
  modified_base 19: mod_base = OTHER; note = 2'O-methyl uridine phosphorothioate
  modified_base 20: mod_base = OTHER; note = 2'O-methyl uridine phosphorothioate
  modified_base 21: mod_base = OTHER; note = 2'O-methyl uridine
taggaacataccaaggcattt

SEQ ID NO: 2193 - RNA, 21 nt, synthetic construct
  source 1..21: mol_type = other RNA
  modified_base 1: mod_base = OTHER; note = 2'O-methyl cytidine phosphorothioate
  modified_base 2: mod_base = OTHER; note = 2'-fluoro adenosine phosphorothioate
  modified_base 3: mod_base = OTHER; note = 2'O-methyl guanosine
  modified_base 4: mod_base = OTHER; note = 2'O-methyl guanosine
  modified_base 5: mod_base = OTHER; note = 2'O-methyl adenosine
  modified_base 6: mod_base = OTHER; note = 2'-fluoro adenosine
  modified_base 7: mod_base = OTHER; note = 2'O-methyl cytidine
  modified_base 8: mod_base = OTHER; note = 2'O-methyl adenosine
  modified_base 9: mod_base = OTHER; note = 2'O-methyl uridine
  modified_base 10: mod_base = OTHER; note = 2'O-methyl adenosine
  modified_base 11: mod_base = OTHER; note = 2'O-methyl cytidine
  modified_base 12: mod_base = OTHER; note = 2'O-methyl cytidine
  modified_base 13: mod_base = OTHER; note = 2'O-methyl adenosine
  modified_base 14: mod_base = OTHER; note = 2'-fluoro adenosine
  modified_base 15: mod_base = OTHER; note = 2'O-methyl guanosine
  modified_base 16: mod_base = OTHER; note = 2'-fluoro guanosine
  modified_base 17: mod_base = OTHER; note = 2'O-methyl cytidine
  modified_base 18: mod_base = OTHER; note = 2'O-methyl adenosine
  modified_base 19: mod_base = OTHER; note = 2'O-methyl uridine phosphorothioate
  modified_base 20: mod_base = OTHER; note = 2'O-methyl cytidine phosphorothioate
  modified_base 21: mod_base = OTHER; note = 2'O-methyl cytidine
caggaacataccaaggcatcc

SEQ ID NO: 2194 - RNA, 21 nt, synthetic construct
  source 1..21: mol_type = other RNA
  modified_base 1: mod_base = OTHER; note = 2'O-methyl adenosine phosphorothioate
  modified_base 2: mod_base = OTHER; note = 2'-fluoro adenosine phosphorothioate
  modified_base 3: mod_base = OTHER; note = 2'O-methyl guanosine
  modified_base 4: mod_base = OTHER; note = 2'O-methyl guanosine
  modified_base 5: mod_base = OTHER; note = 2'O-methyl adenosine
  modified_base 6: mod_base = OTHER; note = 2'-fluoro adenosine
  modified_base 7: mod_base = OTHER; note = 2'O-methyl cytidine
  modified_base 8: mod_base = OTHER; note = 2'O-methyl adenosine
  modified_base 9: mod_base = OTHER; note = 2'O-methyl uridine
  modified_base 10: mod_base = OTHER; note = 2'O-methyl adenosine
  modified_base 11: mod_base = OTHER; note = 2'O-methyl cytidine
  modified_base 12: mod_base = OTHER; note = 2'O-methyl cytidine
  modified_base 13: mod_base = OTHER; note = 2'O-methyl adenosine
  modified_base 14: mod_base = OTHER; note = 2'-fluoro adenosine
  modified_base 15: mod_base = OTHER; note = 2'O-methyl guanosine
  modified_base 16: mod_base = OTHER; note = 2'-fluoro guanosine
  modified_base 17: mod_base = OTHER; note = 2'O-methyl cytidine
  modified_base 18: mod_base = OTHER; note = 2'O-methyl adenosine
  modified_base 19: mod_base = OTHER; note = 2'O-methyl uridine phosphorothioate
  modified_base 20: mod_base = OTHER; note = 2'O-methyl cytidine phosphorothioate
  modified_base 21: mod_base = OTHER; note = 2'O-methyl cytidine
aaggaacataccaaggcatcc

SEQ ID NO: 2195 - RNA, 23 nt, synthetic construct
  source 1..23: mol_type = other RNA
  modified_base 1: mod_base = OTHER; note = 2'O-methyl adenosine phosphorothioate
  modified_base 2: mod_base = OTHER; note = 2'-fluoro guanosine phosphorothioate
  modified_base 3: mod_base = OTHER; note = 2'O-methyl cytidine
  modified_base 4: mod_base = OTHER; note = 2'O-methyl adenosine
  modified_base 5: mod_base = OTHER; note = 2'O-methyl guanosine
  modified_base 6: mod_base = OTHER; note = 2'-fluoro guanosine
  modified_base 7: mod_base = OTHER; note = 2'O-methyl adenosine
  modified_base 8: mod_base = OTHER; note = 2'O-methyl adenosine
  modified_base 9: mod_base = OTHER; note = 2'O-methyl cytidine
  modified_base 10: mod_base = OTHER; note = 2'O-methyl adenosine
  modified_base 11: mod_base = OTHER; note = 2'O-methyl uridine
  modified_base 12: mod_base = OTHER; note = 2'O-methyl adenosine
  modified_base 13: mod_base = OTHER; note = 2'O-methyl cytidine
  modified_base 14: mod_base = OTHER; note = 2'-fluoro cytidine
  modified_base 15: mod_base = OTHER; note = 2'O-methyl adenosine
  modified_base 16: mod_base = OTHER; note = 2'-fluoro adenosine
  modified_base 17: mod_base = OTHER; note = 2'O-methyl guanosine
  modified_base 18: mod_base = OTHER; note = 2'O-methyl guanosine
  modified_base 19: mod_base = OTHER; note = 2'O-methyl cytidine
  modified_base 20: mod_base = OTHER; note = 2'O-methyl adenosine
  modified_base 21: mod_base = OTHER; note = 2'O-methyl uridine phosphorothioate
  modified_base 22: mod_base = OTHER; note = 2'O-methyl cytidine phosphorothioate
  modified_base 23: mod_base = OTHER; note = 2'O-methyl cytidine
agcaggaacataccaaggcatcc

SEQ ID NO: 2196 - RNA, 23 nt, synthetic construct
  source 1..23: mol_type = other RNA
  modified_base 1: mod_base = OTHER; note = 2'O-methyl adenosine phosphorothioate
  modified_base 2: mod_base = OTHER; note = 2'-fluoro adenosine phosphorothioate
  modified_base 3: mod_base = OTHER; note = 2'O-methyl guanosine
  modified_base 4: mod_base = OTHER; note = 2'O-methyl guanosine
  modified_base 5: mod_base = OTHER; note = 2'O-methyl adenosine
  modified_base 6: mod_base = OTHER; note = 2'-fluoro adenosine
  modified_base 7: mod_base = OTHER; note = 2'O-methyl cytidine
  modified_base 8: mod_base = OTHER; note = 2'O-methyl adenosine
  modified_base 9: mod_base = OTHER; note = 2'O-methyl uridine
  modified_base 10: mod_base = OTHER; note = 2'O-methyl adenosine
  modified_base 11: mod_base = OTHER; note = 2'O-methyl cytidine
  modified_base 12: mod_base = OTHER; note = 2'O-methyl cytidine
  modified_base 13: mod_base = OTHER; note = 2'O-methyl adenosine
  modified_base 14: mod_base = OTHER; note = 2'-fluoro adenosine
  modified_base 15: mod_base = OTHER; note = 2'O-methyl guanosine
  modified_base 16: mod_base = OTHER; note = 2'-fluoro guanosine
  modified_base 17: mod_base = OTHER; note = 2'O-methyl cytidine
  modified_base 18: mod_base = OTHER; note = 2'O-methyl adenosine
  modified_base 19: mod_base = OTHER; note = 2'O-methyl uridine
  modified_base 20: mod_base = OTHER; note = 2'O-methyl cytidine
  modified_base 21: mod_base = OTHER; note = 2'O-methyl cytidine phosphorothioate
  modified_base 22: mod_base = OTHER; note = 2'O-methyl adenosine phosphorothioate
  modified_base 23: mod_base = OTHER; note = 2'O-methyl cytidine
aaggaacataccaaggcatccac

SEQ ID NO: 2197 - RNA, 21 nt, synthetic construct
  source 1..21: mol_type = other RNA
  modified_base 1: mod_base = OTHER; note = 5' vinyl phosphonate 2'O-methyl uridine phosphorothioate
  modified_base 2: mod_base = OTHER; note = 2'-fluoro adenosine phosphorothioate
  modified_base 3: mod_base = OTHER; note = 2'O-methyl guanosine
  modified_base 4: mod_base = OTHER; note = 2'O-methyl guanosine
  modified_base 5: mod_base = OTHER; note = 2'O-methyl adenosine
  modified_base 6: mod_base = OTHER; note = 2'-fluoro adenosine
  modified_base 7: mod_base = OTHER; note = 2'O-methyl cytidine
  modified_base 8: mod_base = OTHER; note = 2'O-methyl adenosine
  modified_base 9: mod_base = OTHER; note = 2'O-methyl uridine
  modified_base 10: mod_base = OTHER; note = 2'O-methyl adenosine
  modified_base 11: mod_base = OTHER; note = 2'O-methyl uridine
  modified_base 12: mod_base = OTHER; note = 2'O-methyl cytidine
  modified_base 13: mod_base = OTHER; note = 2'O-methyl adenosine
  modified_base 14: mod_base = OTHER; note = 2'-fluoro adenosine
  modified_base 15: mod_base = OTHER; note = 2'O-methyl guanosine
  modified_base 16: mod_base = OTHER; note = 2'-fluoro guanosine
  modified_base 17: mod_base = OTHER; note = 2'O-methyl cytidine
  modified_base 18: mod_base = OTHER; note = 2'O-methyl adenosine
  modified_base 19: mod_base = OTHER; note = 2'O-methyl uridine phosphorothioate
  modified_base 20: mod_base = OTHER; note = 2'O-methyl uridine phosphorothioate
  modified_base 21: mod_base = OTHER; note = 2'O-methyl uridine
taggaacatatcaaggcattt

SEQ ID NO: 2198 - RNA, 21 nt, synthetic construct
  source 1..21: mol_type = other RNA
  modified_base 1: mod_base = OTHER; note = 5' vinyl phosphonate 2'O-methyl uridine phosphorothioate
  modified_base 2: mod_base = OTHER; note = 2'-fluoro adenosine phosphorothioate
  modified_base 3: mod_base = OTHER; note = 2'O-methyl guanosine
  modified_base 4: mod_base = OTHER; note = 2'O-methyl guanosine
  modified_base 5: mod_base = OTHER; note = 2'O-methyl adenosine
  modified_base 6: mod_base = OTHER; note = 2'-fluoro adenosine
  modified_base 7: mod_base = OTHER; note = 2'O-methyl cytidine
  modified_base 8: mod_base = OTHER; note = 2'O-methyl adenosine
  modified_base 9: mod_base = OTHER; note = 2'O-methyl adenosine
  modified_base 10: mod_base = OTHER; note = 2'O-methyl adenosine
  modified_base 11: mod_base = OTHER; note = 2'O-methyl cytidine
  modified_base 12: mod_base = OTHER; note = 2'O-methyl cytidine
  modified_base 13: mod_base = OTHER; note = 2'O-methyl adenosine
  modified_base 14: mod_base = OTHER; note = 2'-fluoro adenosine
  modified_base 15: mod_base = OTHER; note = 2'O-methyl guanosine
  modified_base 16: mod_base = OTHER; note = 2'-fluoro guanosine
  modified_base 17: mod_base = OTHER; note = 2'O-methyl cytidine
  modified_base 18: mod_base = OTHER; note = 2'O-methyl adenosine
  modified_base 19: mod_base = OTHER; note = 2'O-methyl uridine phosphorothioate
  modified_base 20: mod_base = OTHER; note = 2'O-methyl uridine phosphorothioate
  modified_base 21: mod_base = OTHER; note = 2'O-methyl uridine
taggaacaaaccaaggcattt

SEQ ID NO: 2199 - RNA, 21 nt, synthetic construct
  source 1..21: mol_type = other RNA
  modified_base 1: mod_base = OTHER; note = 5'-deuterated vinyl phosphonate adenosine phosphorothioate
  modified_base 2: mod_base = OTHER; note = 2'-fluoro adenosine phosphorothioate
  modified_base 3: mod_base = OTHER; note = 2'O-methyl guanosine
  modified_base 4: mod_base = OTHER; note = 2'O-methyl guanosine
  modified_base 5: mod_base = OTHER; note = 2'O-methyl adenosine
  modified_base 6: mod_base = OTHER; note = 2'-fluoro adenosine
  modified_base 7: mod_base = OTHER; note = 2'O-methyl cytidine
  modified_base 8: mod_base = OTHER; note = 2'O-methyl adenosine
  modified_base 9: mod_base = OTHER; note = 2'O-methyl adenosine
  modified_base 10: mod_base = OTHER; note = 2'O-methyl adenosine
  modified_base 11: mod_base = OTHER; note = 2'O-methyl cytidine
  modified_base 12: mod_base = OTHER; note = 2'O-methyl cytidine
  modified_base 13: mod_base = OTHER; note = 2'O-methyl adenosine
  modified_base 14: mod_base = OTHER; note = 2'-fluoro adenosine
  modified_base 15: mod_base = OTHER; note = 2'O-methyl guanosine
  modified_base 16: mod_base = OTHER; note = 2'-fluoro guanosine
  modified_base 17: mod_base = OTHER; note = 2'O-methyl cytidine
  modified_base 18: mod_base = OTHER; note = 2'O-methyl adenosine
  modified_base 19: mod_base = OTHER; note = 2'O-methyl uridine phosphorothioate
  modified_base 20: mod_base = OTHER; note = 2'O-methyl cytidine phosphorothioate
  modified_base 21: mod_base = OTHER; note = 2'O-methyl cytidine
aaggaacaaaccaaggcatcc

SEQ ID NO: 2200 - RNA, 21 nt, synthetic construct
  source 1..21: mol_type = other RNA
  modified_base 1: mod_base = OTHER; note = 2'O-methyl cytidine phosphorothioate
  modified_base 2: mod_base = OTHER; note = 2'-fluoro adenosine phosphorothioate
  modified_base 3: mod_base = OTHER; note = 2'O-methyl guanosine
  modified_base 4: mod_base = OTHER; note = 2'O-methyl guanosine
  modified_base 5: mod_base = OTHER; note = 2'-fluoro adenosine
  modified_base 6: mod_base = OTHER; note = 2'O-methyl adenosine
  modified_base 7: mod_base = OTHER; note = 2'O-methyl cytidine
  modified_base 8: mod_base = OTHER; note = 2'-fluoro adenosine
  modified_base 9: mod_base = OTHER; note = 2'O-methyl uridine
  modified_base 10: mod_base = OTHER; note = 2'O-methyl adenosine
  modified_base 11: mod_base = OTHER; note = 2'O-methyl cytidine
  modified_base 12: mod_base = OTHER; note = 2'O-methyl cytidine
  modified_base 13: mod_base = OTHER; note = 2'O-methyl adenosine
  modified_base 14: mod_base = OTHER; note = 2'-fluoro adenosine
  modified_base 15: mod_base = OTHER; note = 2'O-methyl guanosine
  modified_base 16: mod_base = OTHER; note = 2'O-methyl guanosine
  modified_base 17: mod_base = OTHER; note = 2'-fluoro cytidine
  modified_base 18: mod_base = OTHER; note = 2'O-methyl adenosine
  modified_base 19: mod_base = OTHER; note = 2'O-methyl uridine phosphorothioate
  modified_base 20: mod_base = OTHER; note = 2'O-methyl uridine phosphorothioate
  modified_base 21: mod_base = OTHER; note = 2'O-methyl uridine
caggaacataccaaggcattt

SEQ ID NO: 2201 - RNA, 21 nt, synthetic construct
  source 1..21: mol_type = other RNA
  modified_base 1: mod_base = OTHER; note = 2'O-methyl cytidine phosphorothioate
  modified_base 2: mod_base = OTHER; note = 2'-fluoro adenosine phosphorothioate
  modified_base 3: mod_base = OTHER; note = 2'O-methyl guanosine
  modified_base 4: mod_base = OTHER; note = 2'O-methyl guanosine
  modified_base 5: mod_base = OTHER; note = 2'O-methyl adenosine
  modified_base 6: mod_base = OTHER; note = 2'-fluoro adenosine
  modified_base 7: mod_base = OTHER; note = 2'O-methyl cytidine
  modified_base 8: mod_base = OTHER; note = 2'O-methyl adenosine
  modified_base 9: mod_base = OTHER; note = 2'O-methyl uridine
  modified_base 10: mod_base = OTHER; note = 2'O-methyl adenosine
  modified_base 11: mod_base = OTHER; note = 2'O-methyl cytidine
  modified_base 12: mod_base = OTHER; note = 2'O-methyl cytidine
  modified_base 13: mod_base = OTHER; note = 2'O-methyl adenosine
  modified_base 14: mod_base = OTHER; note = 2'-fluoro adenosine
  modified_base 15: mod_base = OTHER; note = 2'O-methyl guanosine
  modified_base 16: mod_base = OTHER; note = 2'-fluoro guanosine
  modified_base 17: mod_base = OTHER; note = 2'O-methyl cytidine
  modified_base 18: mod_base = OTHER; note = 2'O-methyl adenosine
  modified_base 19: mod_base = OTHER; note = 2'O-methyl uridine phosphorothioate
  modified_base 20: mod_base = OTHER; note = 2'O-methyl uridine phosphorothioate
  modified_base 21: mod_base = OTHER; note = 2'O-methyl uridine
caggaacataccaaggcattt

SEQ ID NO: 2202 - RNA, 21 nt, synthetic construct
  source 1..21: mol_type = other RNA
  modified_base 1: mod_base = OTHER; note = 2'O-methyl cytidine phosphorothioate
  modified_base 2: mod_base = OTHER; note = 2'-fluoro adenosine phosphorothioate
  modified_base 3: mod_base = OTHER; note = 2'O-methyl guanosine
  modified_base 4: mod_base = OTHER; note = 2'O-methyl guanosine
  modified_base 5: mod_base = OTHER; note = 2'O-methyl adenosine
  modified_base 6: mod_base = OTHER; note = 2'-fluoro adenosine
  modified_base 7: mod_base = OTHER; note = 2'O-methyl cytidine
  modified_base 8: mod_base = OTHER; note = 2'O-methyl adenosine
  modified_base 9: mod_base = OTHER; note = 2'O-methyl uridine
  modified_base 10: mod_base = OTHER; note = 2'O-methyl adenosine
  modified_base 11: mod_base = OTHER; note = 2'O-methyl cytidine
  modified_base 12: mod_base = OTHER; note = 2'O-methyl cytidine
  modified_base 13: mod_base = OTHER; note = 2'O-methyl adenosine
  modified_base 14: mod_base = OTHER; note = 2'-fluoro adenosine
  modified_base 15: mod_base = OTHER; note = 2'O-methyl guanosine
  modified_base 16: mod_base = OTHER; note = 2'-fluoro guanosine
  modified_base 17: mod_base = OTHER; note = 2'O-methyl cytidine
  modified_base 18: mod_base = OTHER; note = 2'O-methyl adenosine
  modified_base 19: mod_base = OTHER; note = 2'O-methyl uridine phosphorothioate
  modified_base 20: mod_base = OTHER; note = 2'O-methyl uridine phosphorothioate
  modified_base 21: mod_base = OTHER; note = 2'O-methyl uridine
caggaacataccaaggcattt

SEQ ID NO: 2203 - RNA, 21 nt, synthetic construct
  source 1..21: mol_type = other RNA
  modified_base 1: mod_base = OTHER; note = 2'O-methyl cytidine phosphorothioate
  modified_base 2: mod_base = OTHER; note = 2'-fluoro adenosine phosphorothioate
  modified_base 3: mod_base = OTHER; note = 2'O-methyl guanosine
  modified_base 4: mod_base = OTHER; note = 2'O-methyl guanosine
  modified_base 5: mod_base = OTHER; note = 2'O-methyl adenosine
  modified_base 6: mod_base = OTHER; note = 2'-fluoro adenosine
  modified_base 7: mod_base = OTHER; note = 2'O-methyl cytidine
  modified_base 8: mod_base = OTHER; note = 2'O-methyl adenosine
  modified_base 9: mod_base = OTHER; note = 2'O-methyl uridine
  modified_base 10: mod_base = OTHER; note = 2'O-methyl adenosine
  modified_base 11: mod_base = OTHER; note = 2'O-methyl cytidine
  modified_base 12: mod_base = OTHER; note = 2'O-methyl cytidine
  modified_base 13: mod_base = OTHER; note = 2'O-methyl adenosine
  modified_base 14: mod_base = OTHER; note = 2'-fluoro adenosine
  modified_base 15: mod_base = OTHER; note = 2'O-methyl guanosine
  modified_base 16: mod_base = OTHER; note = 2'-fluoro guanosine
  modified_base 17: mod_base = OTHER; note = 2'O-methyl cytidine
  modified_base 18: mod_base = OTHER; note = 2'O-methyl adenosine
  modified_base 19: mod_base = OTHER; note = 2'O-methyl uridine phosphorothioate
  modified_base 20: mod_base = OTHER; note = 2'O-methyl uridine phosphorothioate
  modified_base 21: mod_base = OTHER; note = 2'O-methyl uridine
caggaacataccaaggcattt

SEQ ID NO: 2204 - RNA, 21 nt, synthetic construct
  source 1..21: mol_type = other RNA
  modified_base 1: mod_base = OTHER; note = 2'O-methyl cytidine phosphorothioate
  modified_base 2: mod_base = OTHER; note = 2'-fluoro adenosine phosphorothioate
  modified_base 3: mod_base = OTHER; note = 2'O-methyl guanosine
  modified_base 4: mod_base = OTHER; note = 2'O-methyl guanosine
  modified_base 5: mod_base = OTHER; note = 2'O-methyl adenosine
  modified_base 6: mod_base = OTHER; note = 2'-fluoro adenosine
  modified_base 7: mod_base = OTHER; note = 2'O-methyl cytidine
  modified_base 8: mod_base = OTHER; note = 2'O-methyl adenosine
  modified_base 9: mod_base = OTHER; note = 2'O-methyl uridine
  modified_base 10: mod_base = OTHER; note = 2'O-methyl adenosine
  modified_base 11: mod_base = OTHER; note = 2'O-methyl cytidine
  modified_base 12: mod_base = OTHER; note = 2'O-methyl cytidine
  modified_base 13: mod_base = OTHER; note = 2'O-methyl adenosine
  modified_base 14: mod_base = OTHER; note = 2'-fluoro adenosine
  modified_base 15: mod_base = OTHER; note = 2'O-methyl guanosine
  modified_base 16: mod_base = OTHER; note = 2'-fluoro guanosine
  modified_base 17: mod_base = OTHER; note = 2'O-methyl cytidine
  modified_base 18: mod_base = OTHER; note = 2'O-methyl adenosine
  modified_base 19: mod_base = OTHER; note = 2'O-methyl uridine phosphorothioate
  modified_base 20: mod_base = OTHER; note = 2'O-methyl uridine phosphorothioate
  modified_base 21: mod_base = OTHER; note = 2'O-methyl uridine
caggaacataccaaggcattt

SEQ ID NO: 2205 - RNA, 21 nt, synthetic construct
  source 1..21: mol_type = other RNA
  modified_base 1: mod_base = OTHER; note = 5'-deuterated vinyl phosphonate adenosine phosphorothioate
  modified_base 2: mod_base = OTHER; note = 2'-fluoro adenosine phosphorothioate
  modified_base 3: mod_base = OTHER; note = 2'O-methyl guanosine
  modified_base 4: mod_base = OTHER; note = 2'O-methyl guanosine
  modified_base 5: mod_base = OTHER; note = 2'O-methyl adenosine
  modified_base 6: mod_base = OTHER; note = 2'-fluoro adenosine
  modified_base 7: mod_base = OTHER; note = 2'O-methyl cytidine
  modified_base 8: mod_base = OTHER; note = 2'O-methyl adenosine
  modified_base 9: mod_base = OTHER; note = 2'O-methyl uridine
  modified_base 10: mod_base = OTHER; note = 2'O-methyl adenosine
  modified_base 11: mod_base = OTHER; note = 2'O-methyl cytidine
  modified_base 12: mod_base = OTHER; note = 2'O-methyl cytidine
  modified_base 13: mod_base = OTHER; note = 2'O-methyl adenosine
  modified_base 14: mod_base = OTHER; note = 2'-fluoro adenosine
  modified_base 15: mod_base = OTHER; note = 2'O-methyl guanosine
  modified_base 16: mod_base = OTHER; note = 2'-fluoro guanosine
  modified_base 17: mod_base = OTHER; note = 2'O-methyl cytidine
  modified_base 18: mod_base = OTHER; note = 2'O-methyl adenosine
  modified_base 19: mod_base = OTHER; note = 2'O-methyl uridine phosphorothioate
  modified_base 20: mod_base = OTHER; note = 2'O-methyl cytidine phosphorothioate
  modified_base 21: mod_base = OTHER; note = 2'O-methyl cytidine
aaggaacataccaaggcatcc

SEQ ID NO: 2206 - RNA, 21 nt, synthetic construct
  source 1..21: mol_type = other RNA
  modified_base 1: mod_base = OTHER; note = 2'O-methyl adenosine phosphorothioate
  modified_base 2: mod_base = OTHER; note = 2'-fluoro adenosine phosphorothioate
  modified_base 3: mod_base = OTHER; note = 2'O-methyl guanosine
  modified_base 4: mod_base = OTHER; note = 2'O-methyl guanosine
  modified_base 5: mod_base = OTHER; note = 2'O-methyl adenosine
  modified_base 6: mod_base = OTHER; note = 2'-fluoro adenosine
  modified_base 7: mod_base = OTHER; note = 2'O-methyl cytidine
  modified_base 8: mod_base = OTHER; note = 2'O-methyl adenosine
  modified_base 9: mod_base = OTHER; note = 2'O-methyl uridine
  modified_base 10: mod_base = OTHER; note = 2'O-methyl adenosine
  modified_base 11: mod_base = OTHER; note = 2'O-methyl cytidine
  modified_base 12: mod_base = OTHER; note = 2'O-methyl cytidine
  modified_base 13: mod_base = OTHER; note = 2'O-methyl adenosine
  modified_base 14: mod_base = OTHER; note = 2'-fluoro adenosine
  modified_base 15: mod_base = OTHER; note = 2'O-methyl guanosine
  modified_base 16: mod_base = OTHER; note = 2'-fluoro guanosine
  modified_base 17: mod_base = OTHER; note = 2'O-methyl cytidine
  modified_base 18: mod_base = OTHER; note = 2'O-methyl adenosine
  modified_base 19: mod_base = OTHER; note = 2'O-methyl uridine phosphorothioate
  modified_base 20: mod_base = OTHER; note = 2'O-methyl cytidine phosphorothioate
  modified_base 21: mod_base = OTHER; note = 2'O-methyl cytidine
aaggaacataccaaggcatcc

SEQ ID NO: 2207 - RNA, 21 nt, synthetic construct
  source 1..21: mol_type = other RNA
  modified_base 1: mod_base = OTHER; note = 5'-deuterated vinyl phosphonate adenosine phosphorothioate
  modified_base 2: mod_base = OTHER; note = 2'-fluoro adenosine phosphorothioate
  modified_base 3: mod_base = OTHER; note = 2'O-methyl guanosine
  modified_base 4: mod_base = OTHER; note = 2'O-methyl guanosine
  modified_base 5: mod_base = OTHER; note = 2'O-methyl adenosine
  modified_base 6: mod_base = OTHER; note = 2'-fluoro adenosine
  modified_base 7: mod_base = OTHER; note = 2'O-methyl cytidine
  modified_base 8: mod_base = OTHER; note = 2'O-methyl adenosine
  modified_base 9: mod_base = OTHER; note = 2'O-methyl uridine
  modified_base 10: mod_base = OTHER; note = 2'O-methyl adenosine
  modified_base 11: mod_base = OTHER; note = 2'O-methyl cytidine
  modified_base 12: mod_base = OTHER; note = 2'O-methyl cytidine
  modified_base 13: mod_base = OTHER; note = 2'O-methyl adenosine
  modified_base 14: mod_base = OTHER; note = 2'-fluoro adenosine
  modified_base 15: mod_base = OTHER; note = 2'O-methyl guanosine
  modified_base 16: mod_base = OTHER; note = 2'-fluoro guanosine
  modified_base 17: mod_base = OTHER; note = 2'O-methyl cytidine
  modified_base 18: mod_base = OTHER; note = 2'O-methyl adenosine
  modified_base 19: mod_base = OTHER; note = 2'O-methyl uridine phosphorothioate
  modified_base 20: mod_base = OTHER; note = 2'O-methyl cytidine phosphorothioate
  modified_base 21: mod_base = OTHER; note = 2'O-methyl cytidine
aaggaacataccaaggcatcc

SEQ ID NO: 2208 - RNA, 21 nt, synthetic construct
  source 1..21: mol_type = other RNA
  modified_base 1: mod_base = OTHER; note = 5'-deuterated vinyl phosphonate adenosine phosphorothioate
  modified_base 2: mod_base = OTHER; note = 2'-fluoro adenosine phosphorothioate
  modified_base 3: mod_base = OTHER; note = 2'O-methyl guanosine
  modified_base 4: mod_base = OTHER; note = 2'O-methyl guanosine
  modified_base 5: mod_base = OTHER; note = 2'O-methyl adenosine
  modified_base 6: mod_base = OTHER; note = 2'-fluoro adenosine
  modified_base 7: mod_base = OTHER; note = 2'O-methyl cytidine
  modified_base 8: mod_base = OTHER; note = 2'O-methyl adenosine
  modified_base 9: mod_base = OTHER; note = 2'O-methyl uridine
  modified_base 10: mod_base = OTHER; note = 2'O-methyl adenosine
  modified_base 11: mod_base = OTHER; note = 2'O-methyl cytidine
  modified_base 12: mod_base = OTHER; note = 2'O-methyl cytidine
  modified_base 13: mod_base = OTHER; note = 2'O-methyl adenosine
  modified_base 14: mod_base = OTHER; note = 2'-fluoro adenosine
  modified_base 15: mod_base = OTHER; note = 2'O-methyl guanosine
  modified_base 16: mod_base = OTHER; note = 2'-fluoro guanosine
  modified_base 17: mod_base = OTHER; note = 2'O-methyl cytidine
  modified_base 18: mod_base = OTHER; note = 2'O-methyl adenosine
  modified_base 19: mod_base = OTHER; note = 2'O-methyl uridine phosphorothioate
  modified_base 20: mod_base = OTHER; note = 2'O-methyl cytidine phosphorothioate
  modified_base 21: mod_base = OTHER; note = 2'O-methyl cytidine
aaggaacataccaaggcatcc

SEQ ID NO: 2209 - RNA, 21 nt, synthetic construct
  source 1..21: mol_type = other RNA
  modified_base 1: mod_base = OTHER; note = 2'O-methyl adenosine phosphorothioate
  modified_base 2: mod_base = OTHER; note = 2'-fluoro adenosine phosphorothioate
  modified_base 3: mod_base = OTHER; note = 2'O-methyl guanosine
  modified_base 4: mod_base = OTHER; note = 2'O-methyl guanosine
  modified_base 5: mod_base = OTHER; note = 2'O-methyl adenosine
  modified_base 6: mod_base = OTHER; note = 2'-fluoro adenosine
  modified_base 7: mod_base = OTHER; note = 2'O-methyl cytidine
  modified_base 8: mod_base = OTHER; note = 2'O-methyl adenosine
  modified_base 9: mod_base = OTHER; note = 2'O-methyl uridine
  modified_base 10: mod_base = OTHER; note = 2'O-methyl adenosine
  modified_base 11: mod_base = OTHER; note = 2'O-methyl cytidine
  modified_base 12: mod_base = OTHER; note = 2'O-methyl cytidine
  modified_base 13: mod_base = OTHER; note = 2'O-methyl adenosine
  modified_base 14: mod_base = OTHER; note = 2'-fluoro adenosine
  modified_base 15: mod_base = OTHER; note = 2'O-methyl guanosine
  modified_base 16: mod_base = OTHER; note = 2'-fluoro guanosine
  modified_base 17: mod_base = OTHER; note = 2'O-methyl cytidine
  modified_base 18: mod_base = OTHER; note = 2'O-methyl adenosine
  modified_base 19: mod_base = OTHER; note = 2'O-methyl uridine phosphorothioate
  modified_base 20: mod_base = OTHER; note = 2'O-methyl cytidine phosphorothioate
  modified_base 21: mod_base = OTHER; note = 2'O-methyl cytidine
aaggaacataccaaggcatcc

SEQ ID NO: 2210 - RNA, 21 nt, synthetic construct
  source 1..21: mol_type = other RNA
  modified_base 1: mod_base = OTHER; note = Threo-nucleic acid (TNA) phosphonate uridine
  modified_base 2: mod_base = OTHER; note = 2'-fluoro adenosine phosphorothioate
  modified_base 3: mod_base = OTHER; note = 2'O-methyl guanosine
  modified_base 4: mod_base = OTHER; note = 2'O-methyl guanosine
  modified_base 5: mod_base = OTHER; note = 2'O-methyl adenosine
  modified_base 6: mod_base = OTHER; note = 2'-fluoro adenosine
  modified_base 7: mod_base = OTHER; note = 2'O-methyl cytidine
  modified_base 8: mod_base = OTHER; note = 2'O-methyl adenosine
  modified_base 9: mod_base = OTHER; note = 2'O-methyl uridine
  modified_base 10: mod_base = OTHER; note = 2'O-methyl adenosine
  modified_base 11: mod_base = OTHER; note = 2'O-methyl cytidine
  modified_base 12: mod_base = OTHER; note = 2'O-methyl cytidine
  modified_base 13: mod_base = OTHER; note = 2'O-methyl adenosine
  modified_base 14: mod_base = OTHER; note = 2'-fluoro adenosine
  modified_base 15: mod_base = OTHER; note = 2'O-methyl guanosine
  modified_base 16: mod_base = OTHER; note = 2'-fluoro guanosine
  modified_base 17: mod_base = OTHER; note = 2'O-methyl cytidine
  modified_base 18: mod_base = OTHER; note = 2'O-methyl adenosine
  modified_base 19: mod_base = OTHER; note = 2'O-methyl uridine phosphorothioate
  modified_base 20: mod_base = OTHER; note = 2'O-methyl cytidine phosphorothioate
  modified_base 21: mod_base = OTHER; note = 2'O-methyl cytidine
taggaacataccaaggcatcc

SEQ ID NO: 2211 - RNA, 23 nt, synthetic construct
  source 1..23: mol_type = other RNA
  modified_base 1: mod_base = OTHER; note = 2'O-methyl adenosine phosphorothioate
  modified_base 2: mod_base = OTHER; note = 2'-fluoro adenosine phosphorothioate
  modified_base 3: mod_base = OTHER; note = 2'O-methyl guanosine
  modified_base 4: mod_base = OTHER; note = 2'O-methyl guanosine
  modified_base 5: mod_base = OTHER; note = 2'O-methyl adenosine
  modified_base 6: mod_base = OTHER; note = 2'-fluoro adenosine
  modified_base 7: mod_base = OTHER; note = 2'O-methyl cytidine
  modified_base 8: mod_base = OTHER; note = 2'O-methyl adenosine
  modified_base 9: mod_base = OTHER; note = 2'O-methyl uridine
  modified_base 10: mod_base = OTHER; note = 2'O-methyl adenosine
  modified_base 11: mod_base = OTHER; note = 2'O-methyl cytidine
  modified_base 12: mod_base = OTHER; note = 2'O-methyl cytidine
  modified_base 13: mod_base = OTHER; note = 2'O-methyl adenosine
  modified_base 14: mod_base = OTHER; note = 2'-fluoro adenosine
  modified_base 15: mod_base = OTHER; note = 2'O-methyl guanosine
  modified_base 16: mod_base = OTHER; note = 2'-fluoro guanosine
  modified_base 17: mod_base = OTHER; note = 2'O-methyl cytidine
  modified_base 18: mod_base = OTHER; note = 2'O-methyl adenosine
  modified_base 19: mod_base = OTHER; note = 2'O-methyl uridine
  modified_base 20: mod_base = OTHER; note = 2'O-methyl cytidine
  modified_base 21: mod_base = OTHER; note = 2'O-methyl cytidine phosphorothioate
  modified_base 22: mod_base = OTHER; note = 2'O-methyl adenosine phosphorothioate
  modified_base 23: mod_base = OTHER; note = 2'O-methyl cytidine
aaggaacataccaaggcatccac

SEQ ID NO: 2212 - RNA, 21 nt, synthetic construct
  source 1..21: mol_type = other RNA
  modified_base 1: mod_base = OTHER; note = 5' vinyl phosphonate 2'O-methyl adenosine phosphorothioate
  modified_base 2: mod_base = OTHER; note = 2'-fluoro adenosine phosphorothioate
  modified_base 3: mod_base = OTHER; note = 2'O-methyl guanosine
  modified_base 4: mod_base = OTHER; note = 2'O-methyl guanosine
  modified_base 5: mod_base = OTHER; note = 2'O-methyl adenosine
  modified_base 6: mod_base = OTHER; note = 2'-fluoro adenosine
  modified_base 7: mod_base = OTHER; note = 2'O-methyl cytidine
  modified_base 8: mod_base = OTHER; note = 2'O-methyl adenosine
  modified_base 9: mod_base = OTHER; note = 2'O-methyl adenosine
  modified_base 10: mod_base = OTHER; note = 2'O-methyl adenosine
  modified_base 11: mod_base = OTHER; note = 2'O-methyl cytidine
  modified_base 12: mod_base = OTHER; note = 2'O-methyl cytidine
  modified_base 13: mod_base = OTHER; note = 2'O-methyl adenosine
  modified_base 14: mod_base = OTHER; note = 2'-fluoro adenosine
  modified_base 15: mod_base = OTHER; note = 2'O-methyl guanosine
  modified_base 16: mod_base = OTHER; note = 2'-fluoro guanosine
  modified_base 17: mod_base = OTHER; note = 2'O-methyl cytidine
  modified_base 18: mod_base = OTHER; note = 2'O-methyl adenosine
  modified_base 19: mod_base = OTHER; note = 2'O-methyl uridine phosphorothioate
  modified_base 20: mod_base = OTHER; note = 2'O-methyl cytidine phosphorothioate
  modified_base 21: mod_base = OTHER; note = 2'O-methyl cytidine
aaggaacaaaccaaggcatcc

SEQ ID NO: 2213 - RNA, 23 nt, synthetic construct
  source 1..23: mol_type = other RNA
  modified_base 1: mod_base = OTHER; note = 5' vinyl phosphonate 2'O-methyl uridine phosphorothioate
  modified_base 2: mod_base = OTHER; note = 2'-fluoro uridine phosphorothioate
  modified_base 3: mod_base = OTHER; note = 2'O-methyl uridine
  modified_base 4: mod_base = OTHER; note = 2'O-methyl guanosine
  modified_base 5: mod_base = OTHER; note = 2'O-methyl guanosine
  modified_base 6: mod_base = OTHER; note = 2'-fluoro adenosine
  modified_base 7: mod_base = OTHER; note = 2'O-methyl cytidine
  modified_base 8: mod_base = OTHER; note = 2'O-methyl cytidine
  modified_base 9: mod_base = OTHER; note = 2'O-methyl guanosine
  modified_base 10: mod_base = OTHER; note = 2'O-methyl adenosine
  modified_base 11: mod_base = OTHER; note = 2'O-methyl adenosine
  modified_base 12: mod_base = OTHER; note = 2'O-methyl adenosine
  modified_base 13: mod_base = OTHER; note = 2'O-methyl guanosine
  modified_base 14: mod_base = OTHER; note = 2'-fluoro uridine
  modified_base 15: mod_base = OTHER; note = 2'O-methyl cytidine
  modified_base 16: mod_base = OTHER; note = 2'-fluoro adenosine
  modified_base 17: mod_base = OTHER; note = 2'O-methyl guanosine
  modified_base 18: mod_base = OTHER; note = 2'O-methyl adenosine
  modified_base 19: mod_base = OTHER; note = 2'O-methyl cytidine
  modified_base 20: mod_base = OTHER; note = 2'O-methyl adenosine
  modified_base 21: mod_base = OTHER; note = 2'O-methyl cytidine phosphorothioate
  modified_base 22: mod_base = OTHER; note = 2'O-methyl uridine phosphorothioate
  modified_base 23: mod_base = OTHER; note = 2'O-methyl uridine
tttggaccgaaagtcagacactt

SEQ ID NO: 2214 - RNA, 23 nt, synthetic construct
  source 1..23: mol_type = other RNA
  modified_base 1: mod_base = OTHER; note = 5' vinyl phosphonate 2'O-methyl uridine phosphorothioate
  modified_base 2: mod_base = OTHER; note = 2'-fluoro uridine phosphorothioate
  modified_base 3: mod_base = OTHER; note = 2'O-methyl uridine
  modified_base 4: mod_base = OTHER; note = 2'O-methyl guanosine
  modified_base 5: mod_base = OTHER; note = 2'O-methyl guanosine
  modified_base 6: mod_base = OTHER; note = 2'-fluoro adenosine
  modified_base 7: mod_base = OTHER; note = 2'O-methyl cytidine
  modified_base 8: mod_base = OTHER; note = 2'O-methyl cytidine
  modified_base 9: mod_base = OTHER; note = 2'O-methyl guanosine
  modified_base 10: mod_base = OTHER; note = 2'O-methyl adenosine
  modified_base 11: mod_base = OTHER; note = 2'O-methyl adenosine
  modified_base 12: mod_base = OTHER; note = 2'O-methyl adenosine
  modified_base 13: mod_base = OTHER; note = 2'O-methyl guanosine
  modified_base 14: mod_base = OTHER; note = 2'-fluoro uridine
  modified_base 15: mod_base = OTHER; note = 2'O-methyl cytidine
  modified_base 16: mod_base = OTHER; note = 2'-fluoro adenosine
  modified_base 17: mod_base = OTHER; note = 2'O-methyl guanosine
  modified_base 18: mod_base = OTHER; note = 2'O-methyl adenosine
  modified_base 19: mod_base = OTHER; note = 2'O-methyl cytidine
  modified_base 20: mod_base = OTHER; note = 2'O-methyl adenosine
  modified_base 21: mod_base = OTHER; note = 2'O-methyl cytidine phosphorothioate
  modified_base 22: mod_base = OTHER; note = 2'O-methyl cytidine phosphorothioate
  modified_base 23: mod_base = OTHER; note = 2'O-methyl adenosine
tttggaccgaaagtcagacacca

SEQ ID NO: 2215 - RNA, 23 nt, synthetic construct
  source 1..23: mol_type = other RNA
  modified_base 1: mod_base = OTHER; note = 5' vinyl phosphonate 2'O-methyl adenosine phosphorothioate
  modified_base 2: mod_base = OTHER; note = 2'-fluoro uridine phosphorothioate
  modified_base 3: mod_base = OTHER; note = 2'O-methyl uridine
  modified_base 4: mod_base = OTHER; note = 2'O-methyl guanosine
  modified_base 5: mod_base = OTHER; note = 2'O-methyl guanosine
  modified_base 6: mod_base = OTHER; note = 2'-fluoro adenosine
  modified_base 7: mod_base = OTHER; note = 2'O-methyl cytidine
  modified_base 8: mod_base = OTHER; note = 2'O-methyl cytidine
  modified_base 9: mod_base = OTHER; note = 2'O-methyl guanosine
  modified_base 10: mod_base = OTHER; note = 2'O-methyl adenosine
  modified_base 11: mod_base = OTHER; note = 2'O-methyl adenosine
  modified_base 12: mod_base = OTHER; note = 2'O-methyl adenosine
  modified_base 13: mod_base = OTHER; note = 2'O-methyl guanosine
  modified_base 14: mod_base = OTHER; note = 2'-fluoro uridine
  modified_base 15: mod_base = OTHER; note = 2'O-methyl cytidine
  modified_base 16: mod_base = OTHER; note = 2'-fluoro adenosine
  modified_base 17: mod_base = OTHER; note = 2'O-methyl guanosine
  modified_base 18: mod_base = OTHER; note = 2'O-methyl adenosine
  modified_base 19: mod_base = OTHER; note = 2'O-methyl cytidine
  modified_base 20: mod_base = OTHER; note = 2'O-methyl adenosine
  modified_base 21: mod_base = OTHER; note = 2'O-methyl cytidine phosphorothioate
  modified_base 22: mod_base = OTHER; note = 2'O-methyl cytidine phosphorothioate
  modified_base 23: mod_base = OTHER; note = 2'O-methyl adenosine
attggaccgaaagtcagacacca

SEQ ID NO: 2216 - RNA, 23 nt, synthetic construct
  source 1..23: mol_type = other RNA
  modified_base 1: mod_base = OTHER; note = 2'O-methyl adenosine phosphorothioate
  modified_base 2: mod_base = OTHER; note = 2'-fluoro uridine phosphorothioate
  modified_base 3: mod_base = OTHER; note = 2'O-methyl uridine
  modified_base 4: mod_base = OTHER; note = 2'O-methyl guanosine
  modified_base 5: mod_base = OTHER; note = 2'O-methyl guanosine
  modified_base 6: mod_base = OTHER; note = 2'-fluoro adenosine
  modified_base 7: mod_base = OTHER; note = 2'O-methyl cytidine
  modified_base 8: mod_base = OTHER; note = 2'O-methyl cytidine
  modified_base 9: mod_base = OTHER; note = 2'O-methyl guanosine
  modified_base 10: mod_base = OTHER; note = 2'O-methyl adenosine
  modified_base 11: mod_base = OTHER; note = 2'O-methyl adenosine
  modified_base 12: mod_base = OTHER; note = 2'O-methyl adenosine
  modified_base 13: mod_base = OTHER; note = 2'O-methyl guanosine
  modified_base 14: mod_base = OTHER; note = 2'-fluoro uridine
  modified_base 15: mod_base = OTHER; note = 2'O-methyl cytidine
  modified_base 16: mod_base = OTHER; note = 2'-fluoro adenosine
  modified_base 17: mod_base = OTHER; note = 2'O-methyl guanosine
  modified_base 18: mod_base = OTHER; note = 2'O-methyl adenosine
  modified_base 19: mod_base = OTHER; note = 2'O-methyl cytidine
  modified_base 20: mod_base = OTHER; note = 2'O-methyl adenosine
  modified_base 21: mod_base = OTHER; note = 2'O-methyl cytidine phosphorothioate
  modified_base 22: mod_base = OTHER; note = 2'O-methyl cytidine phosphorothioate
  modified_base 23: mod_base = OTHER; note = 2'O-methyl adenosine
attggaccgaaagtcagacacca

SEQ ID NO: 2217 - RNA, 23 nt, synthetic construct
  source 1..23: mol_type = other RNA
  modified_base 1: mod_base = OTHER; note = 5' vinyl phosphonate 2'O-methyl adenosine phosphorothioate
  modified_base 2: mod_base = OTHER; note = 2'-fluoro uridine phosphorothioate
  modified_base 3: mod_base = OTHER; note = 2'O-methyl cytidine
  modified_base 4: mod_base = OTHER; note = 2'O-methyl cytidine
  modified_base 5: mod_base = OTHER; note = 2'O-methyl adenosine
  modified_base 6: mod_base = OTHER; note = 2'-fluoro cytidine
  modified_base 7: mod_base = OTHER; note = 2'O-methyl guanosine
  modified_base 8: mod_base = OTHER; note = 2'O-methyl adenosine
  modified_base 9: mod_base = OTHER; note = 2'O-methyl cytidine
  modified_base 10: mod_base = OTHER; note = 2'O-methyl uridine
  modified_base 11: mod_base = OTHER; note = 2'O-methyl uridine
  modified_base 12: mod_base = OTHER; note = 2'O-methyl cytidine
  modified_base 13: mod_base = OTHER; note = 2'O-methyl guanosine
  modified_base 14: mod_base = OTHER; note = 2'-fluoro uridine
  modified_base 15: mod_base = OTHER; note = 2'O-methyl cytidine
  modified_base 16: mod_base = OTHER; note = 2'-fluoro uridine
  modified_base 17: mod_base = OTHER; note = 2'O-methyl uridine
  modified_base 18: mod_base = OTHER; note = 2'O-methyl uridine
  modified_base 19: mod_base = OTHER; note = 2'O-methyl guanosine
  modified_base 20: mod_base = OTHER; note = 2'O-methyl guanosine
  modified_base 21: mod_base = OTHER; note = 2'O-methyl adenosine phosphorothioate
  modified_base 22: mod_base = OTHER; note = 2'O-methyl cytidine phosphorothioate
  modified_base 23: mod_base = OTHER; note = 2'O-methyl cytidine
atccacgacttcgtctttggacc

SEQ ID NO: 2218 - RNA, 23 nt, synthetic construct
  source 1..23: mol_type = other RNA
  modified_base 1: mod_base = OTHER; note = 5' vinyl phosphonate 2'O-methyl uridine phosphorothioate
  modified_base 2: mod_base = OTHER; note = 2'-fluoro uridine phosphorothioate
  modified_base 3: mod_base = OTHER; note = 2'O-methyl cytidine
  modified_base 4: mod_base = OTHER; note = 2'O-methyl cytidine
  modified_base 5: mod_base = OTHER; note = 2'O-methyl adenosine
  modified_base 6: mod_base = OTHER; note = 2'-fluoro cytidine
  modified_base 7: mod_base = OTHER; note = 2'O-methyl guanosine
  modified_base 8: mod_base = OTHER; note = 2'O-methyl adenosine
  modified_base 9: mod_base = OTHER; note = 2'O-methyl cytidine
  modified_base 10: mod_base = OTHER; note = 2'O-methyl uridine
  modified_base 11: mod_base = OTHER; note = 2'O-methyl uridine
  modified_base 12: mod_base = OTHER; note = 2'O-methyl cytidine
  modified_base 13: mod_base = OTHER; note = 2'O-methyl guanosine
  modified_base 14: mod_base = OTHER; note = 2'-fluoro uridine
  modified_base 15: mod_base = OTHER; note = 2'O-methyl cytidine
  modified_base 16: mod_base = OTHER; note = 2'-fluoro uridine
  modified_base 17: mod_base = OTHER; note = 2'O-methyl uridine
  modified_base 18: mod_base = OTHER; note = 2'O-methyl uridine
  modified_base 19: mod_base = OTHER; note = 2'O-methyl guanosine
  modified_base 20: mod_base = OTHER; note = 2'O-methyl guanosine
  modified_base 21: mod_base = OTHER; note = 2'O-methyl adenosine phosphorothioate
  modified_base 22: mod_base = OTHER; note = 2'O-methyl cytidine phosphorothioate
  modified_base 23: mod_base = OTHER; note = 2'O-methyl cytidine
ttccacgacttcgtctttggacc

SEQ ID NO: 2219 - RNA, 23 nt, synthetic construct
  source 1..23: mol_type = other RNA
  modified_base 1: mod_base = OTHER; note = 2'O-methyl uridine phosphorothioate
  modified_base 2: mod_base = OTHER; note = 2'-fluoro uridine phosphorothioate
  modified_base 3: mod_base = OTHER; note = 2'O-methyl cytidine
  modified_base 4: mod_base = OTHER; note = 2'O-methyl cytidine
  modified_base 5: mod_base = OTHER; note = 2'O-methyl adenosine
  modified_base 6: mod_base = OTHER; note = 2'-fluoro cytidine
  modified_base 7: mod_base = OTHER; note = 2'O-methyl guanosine
  modified_base 8: mod_base = OTHER; note = 2'O-methyl adenosine
  modified_base 9: mod_base = OTHER; note = 2'O-methyl cytidine
  modified_base 10: mod_base = OTHER; note = 2'O-methyl uridine
  modified_base 11: mod_base = OTHER; note = 2'O-methyl uridine
  modified_base 12: mod_base = OTHER; note = 2'O-methyl cytidine
  modified_base 13: mod_base = OTHER; note = 2'O-methyl guanosine
  modified_base 14: mod_base = OTHER; note = 2'-fluoro uridine
  modified_base 15: mod_base = OTHER; note = 2'O-methyl cytidine
  modified_base 16: mod_base = OTHER; note = 2'-fluoro uridine
  modified_base 17: mod_base = OTHER; note = 2'O-methyl uridine
  modified_base 18: mod_base = OTHER; note = 2'O-methyl uridine
  modified_base 19: mod_base = OTHER; note = 2'O-methyl guanosine
  modified_base 20: mod_base = OTHER; note = 2'O-methyl guanosine
  modified_base 21: mod_base = OTHER; note = 2'O-methyl adenosine phosphorothioate
  modified_base 22: mod_base = OTHER; note = 2'O-methyl cytidine phosphorothioate
  modified_base 23: mod_base = OTHER; note = 2'O-methyl cytidine
ttccacgacttcgtctttggacc

SEQ ID NO: 2220 - RNA, 23 nt, synthetic construct
  source 1..23: mol_type = other RNA
  modified_base 1: mod_base = OTHER; note = 5' vinyl phosphonate 2'O-methyl adenosine phosphorothioate
  modified_base 2: mod_base = OTHER; note = 2'-fluoro guanosine phosphorothioate
  modified_base 3: mod_base = OTHER; note = 2'O-methyl guanosine
  modified_base 4: mod_base = OTHER; note = 2'O-methyl uridine
  modified_base 5: mod_base = OTHER; note = 2'O-methyl guanosine
  modified_base 6: mod_base = OTHER; note = 2'-fluoro adenosine
  modified_base 7: mod_base = OTHER; note = 2'O-methyl uridine
  modified_base 8: mod_base = OTHER; note = 2'O-methyl guanosine
  modified_base 9: mod_base = OTHER; note = 2'O-methyl guanosine
  modified_base 10: mod_base = OTHER; note = 2'O-methyl uridine
  modified_base 11: mod_base = OTHER; note = 2'O-methyl uridine
  modified_base 12: mod_base = OTHER; note = 2'O-methyl guanosine
  modified_base 13: mod_base = OTHER; note = 2'O-methyl uridine
  modified_base 14: mod_base = OTHER; note = 2'-fluoro uridine
  modified_base 15: mod_base = OTHER; note = 2'O-methyl uridine
  modified_base 16: mod_base = OTHER; note = 2'-fluoro uridine
  modified_base 17: mod_base = OTHER; note = 2'O-methyl guanosine
  modified_base 18: mod_base = OTHER; note = 2'O-methyl guanosine
  modified_base 19: mod_base = OTHER; note = 2'O-methyl cytidine
  modified_base 20: mod_base = OTHER; note = 2'O-methyl adenosine
  modified_base 21: mod_base = OTHER; note = 2'O-methyl uridine phosphorothioate
  modified_base 22: mod_base = OTHER; note = 2'O-methyl uridine phosphorothioate
  modified_base 23: mod_base = OTHER; note = 2'O-methyl uridine
aggtgatggttgttttggcattt

SEQ ID NO: 2221 - RNA, 23 nt, synthetic construct
  source 1..23: mol_type = other RNA
  modified_base 1: mod_base = OTHER; note = 5' vinyl phosphonate 2'O-methyl adenosine phosphorothioate
  modified_base 2: mod_base = OTHER; note = 2'-fluoro guanosine phosphorothioate
  modified_base 3: mod_base = OTHER; note = 2'O-methyl guanosine
  modified_base 4: mod_base = OTHER; note = 2'O-methyl uridine
  modified_base 5: mod_base = OTHER; note = 2'O-methyl guanosine
  modified_base 6: mod_base = OTHER; note = 2'-fluoro adenosine
  modified_base 7: mod_base = OTHER; note = 2'O-methyl uridine
  modified_base 8: mod_base = OTHER; note = 2'O-methyl guanosine
  modified_base 9: mod_base = OTHER; note = 2'O-methyl guanosine
  modified_base 10: mod_base = OTHER; note = 2'O-methyl uridine
  modified_base 11: mod_base = OTHER; note = 2'O-methyl uridine
  modified_base 12: mod_base = OTHER; note = 2'O-methyl guanosine
  modified_base 13: mod_base = OTHER; note = 2'O-methyl uridine
  modified_base 14: mod_base = OTHER; note = 2'-fluoro uridine
  modified_base 15: mod_base = OTHER; note = 2'O-methyl uridine
  modified_base 16: mod_base = OTHER; note = 2'-fluoro uridine
  modified_base 17: mod_base = OTHER; note = 2'O-methyl guanosine
  modified_base 18: mod_base = OTHER; note = 2'O-methyl guanosine
  modified_base 19: mod_base = OTHER; note = 2'O-methyl cytidine
  modified_base 20: mod_base = OTHER; note = 2'O-methyl adenosine
  modified_base 21: mod_base = OTHER; note = 2'O-methyl uridine phosphorothioate
  modified_base 22: mod_base = OTHER; note = 2'O-methyl cytidine phosphorothioate
  modified_base 23: mod_base = OTHER; note = 2'O-methyl adenosine
aggtgatggttgttttggcatca

SEQ ID NO: 2222 - RNA, 23 nt, synthetic construct
  source 1..23: mol_type = other RNA
  modified_base 1: mod_base = OTHER; note = 2'O-methyl adenosine phosphorothioate
  modified_base 2: mod_base = OTHER; note = 2'-fluoro guanosine phosphorothioate
  modified_base 3: mod_base = OTHER; note = 2'O-methyl guanosine
  modified_base 4: mod_base = OTHER; note = 2'O-methyl uridine
  modified_base 5: mod_base = OTHER; note = 2'O-methyl guanosine
  modified_base 6: mod_base = OTHER; note = 2'-fluoro adenosine
  modified_base 7: mod_base = OTHER; note = 2'O-methyl uridine
  modified_base 8: mod_base = OTHER; note = 2'O-methyl guanosine
  modified_base 9: mod_base = OTHER; note = 2'O-methyl guanosine
  modified_base 10: mod_base = OTHER; note = 2'O-methyl uridine
  modified_base 11: mod_base = OTHER; note = 2'O-methyl uridine
  modified_base 12: mod_base = OTHER; note = 2'O-methyl guanosine
  modified_base 13: mod_base = OTHER; note = 2'O-methyl uridine
  modified_base 14: mod_base = OTHER; note = 2'-fluoro uridine
  modified_base 15: mod_base = OTHER; note = 2'O-methyl uridine
  modified_base 16: mod_base = OTHER; note = 2'-fluoro uridine
  modified_base 17: mod_base = OTHER; note = 2'O-methyl guanosine
  modified_base 18: mod_base = OTHER; note = 2'O-methyl guanosine
  modified_base 19: mod_base = OTHER; note = 2'O-methyl cytidine
  modified_base 20: mod_base = OTHER; note = 2'O-methyl adenosine
  modified_base 21: mod_base = OTHER; note = 2'O-methyl uridine phosphorothioate
  modified_base 22: mod_base = OTHER; note = 2'O-methyl cytidine phosphorothioate
  modified_base 23: mod_base = OTHER; note = 2'O-methyl adenosine
aggtgatggttgttttggcatca

SEQ ID NO: 2223 - RNA, 23 nt, synthetic construct
  source 1..23: mol_type = other RNA
  modified_base 1: mod_base = OTHER; note = 5' vinyl phosphonate 2'O-methyl uridine phosphorothioate
  modified_base 2: mod_base = OTHER; note = 2'-fluoro adenosine phosphorothioate
  modified_base 3: mod_base = OTHER; note = 2'O-methyl cytidine
  modified_base 4: mod_base = OTHER; note = 2'O-methyl cytidine
  modified_base 5: mod_base = OTHER; note = 2'O-methyl adenosine
  modified_base 6: mod_base = OTHER; note = 2'-fluoro adenosine
  modified_base 7: mod_base = OTHER; note = 2'O-methyl guanosine
  modified_base 8: mod_base = OTHER; note = 2'O-methyl guanosine
  modified_base 9: mod_base = OTHER; note = 2'O-methyl cytidine
  modified_base 10: mod_base = OTHER; note = 2'O-methyl adenosine
  modified_base 11: mod_base = OTHER; note = 2'O-methyl uridine
  modified_base 12: mod_base = OTHER; note = 2'O-methyl cytidine
  modified_base 13: mod_base = OTHER; note = 2'O-methyl cytidine
  modified_base 14: mod_base = OTHER; note = 2'-fluoro adenosine
  modified_base 15: mod_base = OTHER; note = 2'O-methyl cytidine
  modified_base 16: mod_base = OTHER; note = 2'-fluoro guanosine
  modified_base 17: mod_base = OTHER; note = 2'O-methyl adenosine
  modified_base 18: mod_base = OTHER; note = 2'O-methyl cytidine
  modified_base 19: mod_base = OTHER; note = 2'O-methyl uridine
  modified_base 20: mod_base = OTHER; note = 2'O-methyl uridine
  modified_base 21: mod_base = OTHER; note = 2'O-methyl cytidine phosphorothioate
  modified_base 22: mod_base = OTHER; note = 2'O-methyl guanosine phosphorothioate
  modified_base 23: mod_base = OTHER; note = 2'O-methyl uridine
taccaaggcatccacgacttcgt

SEQ ID NO: 2224 - RNA, 23 nt, synthetic construct
  source 1..23: mol_type = other RNA
  modified_base 1: mod_base = OTHER; note = 5' vinyl phosphonate 2'O-methyl adenosine phosphorothioate
  modified_base 2: mod_base = OTHER; note = 2'-fluoro adenosine phosphorothioate
  modified_base 3: mod_base = OTHER; note = 2'O-methyl cytidine
  modified_base 4: mod_base = OTHER; note = 2'O-methyl cytidine
  modified_base 5: mod_base = OTHER; note = 2'O-methyl adenosine
  modified_base 6: mod_base = OTHER; note = 2'-fluoro adenosine
  modified_base 7: mod_base = OTHER; note = 2'O-methyl guanosine
  modified_base 8: mod_base = OTHER; note = 2'O-methyl guanosine
  modified_base 9: mod_base = OTHER; note = 2'O-methyl cytidine
  modified_base 10: mod_base = OTHER; note = 2'O-methyl adenosine
  modified_base 11: mod_base = OTHER; note = 2'O-methyl uridine
  modified_base 12: mod_base = OTHER; note = 2'O-methyl cytidine
  modified_base 13: mod_base = OTHER; note = 2'O-methyl cytidine
  modified_base 14: mod_base = OTHER; note = 2'-fluoro adenosine
  modified_base 15: mod_base = OTHER; note = 2'O-methyl cytidine
  modified_base 16: mod_base = OTHER; note = 2'-fluoro guanosine
  modified_base 17: mod_base = OTHER; note = 2'O-methyl adenosine
  modified_base 18: mod_base = OTHER; note = 2'O-methyl cytidine
  modified_base 19: mod_base = OTHER; note = 2'O-methyl uridine
  modified_base 20: mod_base = OTHER; note = 2'O-methyl uridine
  modified_base 21: mod_base = OTHER; note = 2'O-methyl cytidine phosphorothioate
  modified_base 22: mod_base = OTHER; note = 2'O-methyl guanosine phosphorothioate
  modified_base 23: mod_base = OTHER; note = 2'O-methyl uridine
aaccaaggcatccacgacttcgt

SEQ ID NO: 2225 - RNA, 23 nt, synthetic construct
  source 1..23: mol_type = other RNA
  modified_base 1: mod_base = OTHER; note = 2'O-methyl adenosine phosphorothioate
  modified_base 2: mod_base = OTHER; note = 2'-fluoro adenosine phosphorothioate
  modified_base 3: mod_base = OTHER; note = 2'O-methyl cytidine
  modified_base 4: mod_base = OTHER; note = 2'O-methyl cytidine
  modified_base 5: mod_base = OTHER; note = 2'O-methyl adenosine
  modified_base 6: mod_base = OTHER; note = 2'-fluoro adenosine
  modified_base 7: mod_base = OTHER; note = 2'O-methyl guanosine
  modified_base 8: mod_base = OTHER; note = 2'O-methyl guanosine
  modified_base 9: mod_base = OTHER; note = 2'O-methyl cytidine
  modified_base 10: mod_base = OTHER; note = 2'O-methyl adenosine
  modified_base 11: mod_base = OTHER; note = 2'O-methyl uridine
  modified_base 12: mod_base = OTHER; note = 2'O-methyl cytidine
  modified_base 13: mod_base = OTHER; note = 2'O-methyl cytidine
  modified_base 14: mod_base = OTHER; note = 2'-fluoro adenosine
  modified_base 15: mod_base = OTHER; note = 2'O-methyl cytidine
  modified_base 16: mod_base = OTHER; note = 2'-fluoro guanosine
  modified_base 17: mod_base = OTHER; note = 2'O-methyl adenosine
  modified_base 18: mod_base = OTHER; note = 2'O-methyl cytidine
  modified_base 19: mod_base = OTHER; note = 2'O-methyl uridine
  modified_base 20: mod_base = OTHER; note = 2'O-methyl uridine
  modified_base 21: mod_base = OTHER; note = 2'O-methyl cytidine phosphorothioate
  modified_base 22: mod_base = OTHER; note = 2'O-methyl guanosine phosphorothioate
  modified_base 23: mod_base = OTHER; note = 2'O-methyl uridine
aaccaaggcatccacgacttcgt

SEQ ID NO: 2226 - RNA, 23 nt, synthetic construct
  source 1..23: mol_type = other RNA
  modified_base 1: mod_base = OTHER; note = 2'O-methyl adenosine phosphorothioate
  modified_base 2: mod_base = OTHER; note = 2'-fluoro adenosine phosphorothioate
  modified_base 3: mod_base = OTHER; note = 2'O-methyl cytidine
  modified_base 4: mod_base = OTHER; note = 2'O-methyl adenosine
  modified_base 5: mod_base = OTHER; note = 2'O-methyl uridine
  modified_base 6: mod_base = OTHER; note = 2'-fluoro adenosine
  modified_base 7: mod_base = OTHER; note = 2'O-methyl cytidine
  modified_base 8: mod_base = OTHER; note = 2'O-methyl cytidine
  modified_base 9: mod_base = OTHER; note = 2'O-methyl adenosine
  modified_base 10: mod_base = OTHER; note = 2'O-methyl adenosine
  modified_base 11: mod_base = OTHER; note = 2'O-methyl guanosine
  modified_base 12: mod_base = OTHER; note = 2'O-methyl guanosine
  modified_base 13: mod_base = OTHER; note = 2'O-methyl cytidine
  modified_base 14: mod_base = OTHER; note = 2'-fluoro adenosine
  modified_base 15: mod_base = OTHER; note = 2'O-methyl uridine
  modified_base 16: mod_base = OTHER; note = 2'-fluoro cytidine
  modified_base 17: mod_base = OTHER; note = 2'O-methyl cytidine
  modified_base 18: mod_base = OTHER; note = 2'O-methyl adenosine
  modified_base 19: mod_base = OTHER; note = 2'O-methyl cytidine
  modified_base 20: mod_base = OTHER; note = 2'O-methyl guanosine
  modified_base 21: mod_base = OTHER; note = 2'O-methyl adenosine phosphorothioate
  modified_base 22: mod_base = OTHER; note = 2'O-methyl cytidine phosphorothioate
  modified_base 23: mod_base = OTHER; note = 2'O-methyl uridine
aacataccaaggcatccacgact

SEQ ID NO: 2227 - RNA, 23 nt, synthetic construct
  source 1..23: mol_type = other RNA
  modified_base 1: mod_base = OTHER; note = 2'O-methyl adenosine phosphorothioate
  modified_base 2: mod_base = OTHER; note = 2'-fluoro adenosine phosphorothioate
  modified_base 3: mod_base = OTHER; note = 2'O-methyl uridine
  modified_base 4: mod_base = OTHER; note = 2'O-methyl adenosine
  modified_base 5: mod_base = OTHER; note = 2'O-methyl cytidine
  modified_base 6: mod_base = OTHER; note = 2'-fluoro cytidine
  modified_base 7: mod_base = OTHER; note = 2'O-methyl adenosine
  modified_base 8: mod_base = OTHER; note = 2'O-methyl adenosine
  modified_base 9: mod_base = OTHER; note = 2'O-methyl guanosine
  modified_base 10: mod_base = OTHER; note = 2'O-methyl guanosine
  modified_base 11: mod_base = OTHER; note = 2'O-methyl cytidine
  modified_base 12: mod_base = OTHER; note = 2'O-methyl adenosine
  modified_base 13: mod_base = OTHER; note = 2'O-methyl uridine
  modified_base 14: mod_base = OTHER; note = 2'-fluoro cytidine
  modified_base 15: mod_base = OTHER; note = 2'O-methyl cytidine
  modified_base 16: mod_base = OTHER; note = 2'-fluoro adenosine
  modified_base 17: mod_base = OTHER; note = 2'O-methyl cytidine
  modified_base 18: mod_base = OTHER; note = 2'O-methyl guanosine
  modified_base 19: mod_base = OTHER; note = 2'O-methyl adenosine
  modified_base 20: mod_base = OTHER; note = 2'O-methyl cytidine
  modified_base 21: mod_base = OTHER; note = 2'O-methyl uridine phosphorothioate
  modified_base 22: mod_base = OTHER; note = 2'O-methyl uridine phosphorothioate
  modified_base 23: mod_base = OTHER; note = 2'O-methyl cytidine
aataccaaggcatccacgacttc

SEQ ID NO: 2228 - RNA, 21 nt, synthetic construct
  source 1..21: mol_type = other RNA
tccaaagacgaagtcgtggat

SEQ ID NO: 2229 - RNA, 21 nt, synthetic construct
  source 1..21: mol_type = other RNA
  modified_base 10: mod_base = OTHER; note = 2'-fluoro-2-Pyridone
atgccaaaanaaccatcaccg

SEQ ID NO: 2230 - RNA, 21 nt, synthetic construct
  source 1..21: mol_type = other RNA
  modified_base 19: mod_base = OTHER; note = 2'-OMe-3',4'-seco-cytidine
atgccaaaacaaccatcaccg

SEQ ID NO: 2231 - RNA, 21 nt, synthetic construct
  source 1..21: mol_type = other RNA
atgccaaaacaaccatcacct

SEQ ID NO: 2232 - RNA, 21 nt, synthetic construct
  source 1..21: mol_type = other RNA
  modified_base 10: mod_base = OTHER; note = 2'-fluoro-2-Pyridone
atgccaaaanaaccatcacct

SEQ ID NO: 2233 - RNA, 21 nt, synthetic construct
  source 1..21: mol_type = other RNA
gaagtcgtggatgccttggta

SEQ ID NO: 2234 - RNA, 21 nt, synthetic construct
  source 1..21: mol_type = other RNA
gaagtcgtggatgccttggta

SEQ ID NO: 2235 - RNA, 21 nt, synthetic construct
  source 1..21: mol_type = other RNA
gaagtcgtggatgccttggtt

SEQ ID NO: 2236 - RNA, 21 nt, synthetic construct
  source 1..21: mol_type = other RNA
gaagtcgtggctgccttggta

SEQ ID NO: 2237 - RNA, 21 nt, synthetic construct
  source 1..21: mol_type = other RNA
  modified_base 19: mod_base = OTHER; note = 2'-OMe-3',4'-seco-guanosine
gaagtcgtggatgccttggta

SEQ ID NO: 2238 - RNA, 21 nt, synthetic construct
  source 1..21: mol_type = other RNA
gaagtcgtggatgccttggtt

SEQ ID NO: 2239 - RNA, 21 nt, synthetic construct
  source 1..21: mol_type = other RNA
gaagtcgtggctgccttggta

SEQ ID NO: 2240 - RNA, 21 nt, synthetic construct
  source 1..21: mol_type = other RNA
  modified_base 19: mod_base = OTHER; note = 2'-OMe-3',4'-seco-guanosine
gaagtcgtggatgccttggta

SEQ ID NO: 2241 - RNA, 21 nt, synthetic construct
  source 1..21: mol_type = other RNA
gtcgtggatgccttggtatgt

SEQ ID NO: 2242 - RNA, 21 nt, synthetic construct
  source 1..21: mol_type = other RNA
tcgtggatgccttggtatgtt

SEQ ID NO: 2243 - RNA, 21 nt, synthetic construct
  source 1..21: mol_type = other RNA
tcgtggatgccttggtatgtt

SEQ ID NO: 2244 - RNA, 19 nt, synthetic construct
  source 1..19: mol_type = other RNA
atggaggagtgagtgacaa

SEQ ID NO: 2245 - RNA, 21 nt, synthetic construct
  source 1..21: mol_type = other RNA
atgccaaaacaaccatcaccg

SEQ ID NO: 2246 - RNA, 21 nt, synthetic construct
  source 1..21: mol_type = other RNA
gaagtcgtggatgccttggta

SEQ ID NO: 2247 - RNA, 21 nt, synthetic construct
  source 1..21: mol_type = other RNA
gaagtcgtggatgccttggta

SEQ ID NO: 2248 - RNA, 21 nt, synthetic construct
  source 1..21: mol_type = other RNA
gtgtctgactttcggtccaaa

SEQ ID NO: 2249 - RNA, 21 nt, synthetic construct
  source 1..21: mol_type = other RNA
tccaaagacgaagtcgtggat

SEQ ID NO: 2250 - RNA, 21 nt, synthetic construct
  source 1..21: mol_type = other RNA
gtcgtggatgccttggtatgt

SEQ ID NO: 2251 - RNA, 21 nt, synthetic construct
  source 1..21: mol_type = other RNA
atgccaaaacaaccatcaccg

SEQ ID NO: 2252 - RNA, 21 nt, synthetic construct
  source 1..21: mol_type = other RNA
gaagtcgtggatgccttggta

SEQ ID NO: 2253 - RNA, 23 nt, synthetic construct
  source 1..23: mol_type = other RNA
atccacgacttcgtctttggatt

SEQ ID NO: 2254 - RNA, 23 nt, synthetic construct
  source 1..23: mol_type = other RNA
aggtgatggttgttttggcatca

SEQ ID NO: 2255 - RNA, 23 nt, synthetic construct
  source 1..23: mol_type = other RNA
aggtgatggttgttttggcatca

SEQ ID NO: 2256 - RNA, 23 nt, synthetic construct
  source 1..23: mol_type = other RNA
aggtgatggttgttttggcatca

SEQ ID NO: 2257 - RNA, 23 nt, synthetic construct
  source 1..23: mol_type = other RNA
aggtgatggttgttttggcatca

SEQ ID NO: 2258 - RNA, 23 nt, synthetic construct
  source 1..23: mol_type = other RNA
taccaaggcatccacgacttcgt

SEQ ID NO: 2259 - RNA, 23 nt, synthetic construct
  source 1..23: mol_type = other RNA
aaccaaggcatccacgacttcgt

SEQ ID NO: 2260 - RNA, 23 nt, synthetic construct
  source 1..23: mol_type = other RNA
aaccaaggcatccacgacttcgt

SEQ ID NO: 2261 - RNA, 23 nt, synthetic construct
  source 1..23: mol_type = other RNA
aaccaaggcatccacgacttcgt

SEQ ID NO: 2262 - RNA, 23 nt, synthetic construct
  source 1..23: mol_type = other RNA
aaccaaggcatccacgacttcgt

SEQ ID NO: 2263 - RNA, 23 nt, synthetic construct
  source 1..23: mol_type = other RNA
aaccaaggcatccacgacttcgt

SEQ ID NO: 2264 - RNA, 23 nt, synthetic construct
  source 1..23: mol_type = other RNA
aaccaaggcatccacgacttcgt

SEQ ID NO: 2265 - RNA, 23 nt, synthetic construct
  source 1..23: mol_type = other RNA
aaccaaggcatccacgacttcgt

SEQ ID NO: 2266 - RNA, 23 nt, synthetic construct
  source 1..23: mol_type = other RNA
acataccaaggcatccacgactt

SEQ ID NO: 2267 - RNA, 23 nt, synthetic construct
  source 1..23: mol_type = other RNA
aacataccaaggcatccacgatt

SEQ ID NO: 2268 - RNA, 23 nt, synthetic construct
  source 1..23: mol_type = other RNA
aacataccaaggcatccacgatt

SEQ ID NO: 2269 - RNA, 21 nt, synthetic construct
  source 1..21: mol_type = other RNA
ttgtcactcactcctccattt

SEQ ID NO: 2270 - RNA, 23 nt, synthetic construct
  source 1..23: mol_type = other RNA
cggtgatggttgttttggcattt

SEQ ID NO: 2271 - RNA, 23 nt, synthetic construct
  source 1..23: mol_type = other RNA
taccaaggcatccacgacttctt

SEQ ID NO: 2272 - RNA, 23 nt, synthetic construct
  source 1..23: mol_type = other RNA
taccaaggcatccacgacttctt

SEQ ID NO: 2273 - RNA, 23 nt, synthetic construct
  source 1..23: mol_type = other RNA
tttggaccgaaagtcagacactt

SEQ ID NO: 2274 - RNA, 23 nt, synthetic construct
  source 1..23: mol_type = other RNA
atccacgacttcgtctttggatt

SEQ ID NO: 2275 - RNA, 23 nt, synthetic construct
  source 1..23: mol_type = other RNA
acataccaaggcatccacgactt

SEQ ID NO: 2276 - RNA, 23 nt, synthetic construct
  source 1..23: mol_type = other RNA
cggtgatggttgttttggcattt

SEQ ID NO: 2277 - RNA, 23 nt, synthetic construct
  source 1..23: mol_type = other RNA
taccaaggcatccacgacttctt

SEQ ID NO: 2278 - RNA, 21 nt, synthetic construct
  source 1..21: mol_type = other RNA
  modified_base 1: mod_base = OTHER; note = 2'O-methyl uridine phosphorothioate
  modified_base 2: mod_base = OTHER; note = 2'O-methyl cytidine phosphorothioate
  modified_base 3: mod_base = OTHER; note = 2'O-methyl cytidine
  modified_base 4: mod_base = OTHER; note = 2'O-methyl adenosine
  modified_base 5: mod_base = OTHER; note = 2'O-methyl adenosine
  modified_base 6: mod_base = OTHER; note = 2'O-methyl adenosine
  modified_base 7: mod_base = OTHER; note = 2'-fluoro guanosine
  modified_base 8: mod_base = OTHER; note = 2'O-methyl adenosine
  modified_base 9: mod_base = OTHER; note = 2'-fluoro cytidine
  modified_base 10: mod_base = OTHER; note = 2'-fluoro guanosine
  modified_base 11: mod_base = OTHER; note = 2'-fluoro adenosine
  modified_base 12: mod_base = OTHER; note = 2'O-methyl adenosine
  modified_base 13: mod_base = OTHER; note = 2'O-methyl guanosine
  modified_base 14: mod_base = OTHER; note = 2'O-methyl uridine
  modified_base 15: mod_base = OTHER; note = 2'O-methyl cytidine
  modified_base 16: mod_base = OTHER; note = 2'O-methyl guanosine
  modified_base 17: mod_base = OTHER; note = 2'O-methyl uridine
  modified_base 18: mod_base = OTHER; note = 2'O-methyl guanosine
  modified_base 19: mod_base = OTHER; note = 2'O-methyl guanosine
  modified_base 20: mod_base = OTHER; note = 2'O-methyl adenosine
  modified_base 21: mod_base = OTHER; note = 2'O-methyl uridine 6-(5-(((2R,3R,4R,5R,6R)-3-acetamido-4,5-dihydroxy-6-(hydrox ymethyl)tetrahydro-2H-pyran-2-yl)oxy)pentanamido)-N-(6-(4-( hydroxymethyl)-4-(methoxymethyl)piperidin-1-yl)-6-oxohexyl) hexanamide-phosphorothioate-6-(5-(((2R,3R,4R,5R,6R)-3-aceta mido-4,5-dihydroxy-6-(hydroxymethyl)tetrahydro-2H-pyran-2-y l)oxy)pentanamido)-N-(6-(4-(hydroxymethyl)-4-(methoxymethyl )piperidin-1-yl)-6-oxohexyl)hexanamide-phosphorothioate-6-( 5-(((2R,3R,4R,5R,6R)-3-acetamido-4,5-dihydroxy-6-(hydroxyme thyl)tetrahydro-2H-pyran-2-yl)oxy)pentanamido)-N-(6-(4-(hyd roxymethyl)-4-(methoxymethyl)piperidin-1-yl)-6-oxohexyl)hex anamide
tccaaagacgaagtcgtggat

SEQ ID NO: 2279 - RNA, 21 nt, synthetic construct
  source 1..21: mol_type = other RNA
  modified_base 1: mod_base = OTHER; note = 2'O-methyl adenosine phosphorothioate
  modified_base 2: mod_base = OTHER; note = 2'O-methyl uridine phosphorothioate
  modified_base 3: mod_base = OTHER; note = 2'O-methyl guanosine
  modified_base 4: mod_base = OTHER; note = 2'O-methyl cytidine
  modified_base 5: mod_base = OTHER; note = 2'O-methyl cytidine
  modified_base 6: mod_base = OTHER; note = 2'O-methyl adenosine
  modified_base 7: mod_base = OTHER; note = 2'-fluoro adenosine
  modified_base 8: mod_base = OTHER; note = 2'O-methyl adenosine
  modified_base 9: mod_base = OTHER; note = 2'-fluoro adenosine
  modified_base 10: mod_base = OTHER; note = 2'-fluoro-2-Pyridone
  modified_base 11: mod_base = OTHER; note = 2'-fluoro adenosine
  modified_base 12: mod_base = OTHER; note = 2'O-methyl adenosine
  modified_base 13: mod_base = OTHER; note = 2'O-methyl cytidine
  modified_base 14: mod_base = OTHER; note = 2'O-methyl cytidine
  modified_base 15: mod_base = OTHER; note = 2'O-methyl adenosine
  modified_base 16: mod_base = OTHER; note = 2'O-methyl uridine
  modified_base 17: mod_base = OTHER; note = 2'O-methyl cytidine
  modified_base 18: mod_base = OTHER; note = 2'O-methyl adenosine
  modified_base 19: mod_base = OTHER; note = 2'O-methyl cytidine
  modified_base 20: mod_base = OTHER; note = 2'O-methyl cytidine
  modified_base 21: mod_base = OTHER; note = 2'O-methyl guanosine 6-(5-(((2R,3R,4R,5R,6R)-3-acetamido-4,5-dihydroxy-6-(hydrox ymethyl)tetrahydro-2H-pyran-2-yl)oxy)pentanamido)-N-(6-(4-( hydroxymethyl)-4-(methoxymethyl)piperidin-1-yl)-6-oxohexyl) hexanamide-phosphorothioate-6-(5-(((2R,3R,4R,5R,6R)-3-aceta mido-4,5-dihydroxy-6-(hydroxymethyl)tetrahydro-2H-pyran-2-y l)oxy)pentanamido)-N-(6-(4-(hydroxymethyl)-4-(methoxymethyl )piperidin-1-yl)-6-oxohexyl)hexanamide-phosphorothioate-6-( 5-(((2R,3R,4R,5R,6R)-3-acetamido-4,5-dihydroxy-6-(hydroxyme thyl)tetrahydro-2H-pyran-2-yl)oxy)pentanamido)-N-(6-(4-(hyd roxymethyl)-4-(methoxymethyl)piperidin-1-yl)-6-oxohexyl)hex anamide
atgccaaaanaaccatcaccg

SEQ ID NO: 2280 - RNA, 21 nt, synthetic construct
  source 1..21: mol_type = other RNA
  modified_base 1: mod_base = OTHER; note = 2'O-methyl adenosine phosphorothioate
  modified_base 2: mod_base = OTHER; note = 2'O-methyl uridine phosphorothioate
  modified_base 3: mod_base = OTHER; note = 2'O-methyl guanosine
  modified_base 4: mod_base = OTHER; note = 2'O-methyl cytidine
  modified_base 5: mod_base = OTHER; note = 2'O-methyl cytidine
  modified_base 6: mod_base = OTHER; note = 2'O-methyl adenosine
  modified_base 7: mod_base = OTHER; note = 2'-fluoro adenosine
  modified_base 8: mod_base = OTHER; note = 2'O-methyl adenosine
  modified_base 9: mod_base = OTHER; note = 2'-fluoro adenosine
  modified_base 10: mod_base = OTHER; note = 2'-fluoro cytidine
  modified_base 11: mod_base = OTHER; note = 2'-fluoro adenosine
  modified_base 12: mod_base = OTHER; note = 2'O-methyl adenosine
  modified_base 13: mod_base = OTHER; note = 2'O-methyl cytidine
  modified_base 14: mod_base = OTHER; note = 2'O-methyl cytidine
  modified_base 15: mod_base = OTHER; note = 2'O-methyl adenosine
  modified_base 16: mod_base = OTHER; note = 2'O-methyl uridine
  modified_base 17: mod_base = OTHER; note = 2'O-methyl cytidine
  modified_base 18: mod_base = OTHER; note = 2'O-methyl adenosine
  modified_base 19: mod_base = OTHER; note = 2'-OMe-3',4'-seco-cytidine
  modified_base 20: mod_base = OTHER; note = 2'O-methyl cytidine
  modified_base 21: mod_base = OTHER; note = 2'O-methyl guanosine 6-(5-(((2R,3R,4R,5R,6R)-3-acetamido-4,5-dihydroxy-6-(hydrox ymethyl)tetrahydro-2H-pyran-2-yl)oxy)pentanamido)-N-(6-(4-( hydroxymethyl)-4-(methoxymethyl)piperidin-1-yl)-6-oxohexyl) hexanamide-phosphorothioate-6-(5-(((2R,3R,4R,5R,6R)-3-aceta mido-4,5-dihydroxy-6-(hydroxymethyl)tetrahydro-2H-pyran-2-y l)oxy)pentanamido)-N-(6-(4-(hydroxymethyl)-4-(methoxymethyl )piperidin-1-yl)-6-oxohexyl)hexanamide-phosphorothioate-6-( 5-(((2R,3R,4R,5R,6R)-3-acetamido-4,5-dihydroxy-6-(hydroxyme thyl)tetrahydro-2H-pyran-2-yl)oxy)pentanamido)-N-(6-(4-(hyd roxymethyl)-4-(methoxymethyl)piperidin-1-yl)-6-oxohexyl)hex anamide
atgccaaaacaaccatcaccg

SEQ ID NO: 2281 - RNA, 21 nt, synthetic construct
  source 1..21: mol_type = other RNA
  modified_base 1: mod_base = OTHER; note = 2'O-methyl adenosine phosphorothioate
  modified_base 2: mod_base = OTHER; note = 2'O-methyl uridine phosphorothioate
  modified_base 3: mod_base = OTHER; note = 2'O-methyl guanosine
  modified_base 4: mod_base = OTHER; note = 2'O-methyl cytidine
  modified_base 5: mod_base = OTHER; note = 2'O-methyl cytidine
  modified_base 6: mod_base = OTHER; note = 2'O-methyl adenosine
  modified_base 7: mod_base = OTHER; note = 2'-fluoro adenosine
  modified_base 8: mod_base = OTHER; note = 2'O-methyl adenosine
  modified_base 9: mod_base = OTHER; note = 2'-fluoro adenosine
  modified_base 10: mod_base = OTHER; note = 2'-fluoro cytidine
  modified_base 11: mod_base = OTHER; note = 2'-fluoro adenosine
  modified_base 12: mod_base = OTHER; note = 2'O-methyl adenosine
  modified_base 13: mod_base = OTHER; note = 2'O-methyl cytidine
  modified_base 14: mod_base = OTHER; note = 2'O-methyl cytidine
  modified_base 15: mod_base = OTHER; note = 2'O-methyl adenosine
  modified_base 16: mod_base = OTHER; note = 2'O-methyl uridine
  modified_base 17: mod_base = OTHER; note = 2'O-methyl cytidine
  modified_base 18: mod_base = OTHER; note = 2'O-methyl adenosine
  modified_base 19: mod_base = OTHER; note = 2'O-methyl cytidine
  modified_base 20: mod_base = OTHER; note = 2'O-methyl cytidine
  modified_base 21: mod_base = OTHER; note = 2'O-methyl uridine 6-(5-(((2R,3R,4R,5R,6R)-3-acetamido-4,5-dihydroxy-6-(hydrox ymethyl)tetrahydro-2H-pyran-2-yl)oxy)pentanamido)-N-(6-(4-( hydroxymethyl)-4-(methoxymethyl)piperidin-1-yl)-6-oxohexyl) hexanamide-phosphorothioate-6-(5-(((2R,3R,4R,5R,6R)-3-aceta mido-4,5-dihydroxy-6-(hydroxymethyl)tetrahydro-2H-pyran-2-y l)oxy)pentanamido)-N-(6-(4-(hydroxymethyl)-4-(methoxymethyl )piperidin-1-yl)-6-oxohexyl)hexanamide-phosphorothioate-6-( 5-(((2R,3R,4R,5R,6R)-3-acetamido-4,5-dihydroxy-6-(hydroxyme thyl)tetrahydro-2H-pyran-2-yl)oxy)pentanamido)-N-(6-(4-(hyd roxymethyl)-4-(methoxymethyl)piperidin-1-yl)-6-oxohexyl)hex anamide
atgccaaaacaaccatcacct

SEQ ID NO: 2282 - RNA, 21 nt, synthetic construct
  source 1..21: mol_type = other RNA
  modified_base 1: mod_base = OTHER; note = 2'O-methyl adenosine phosphorothioate
  modified_base 2: mod_base = OTHER; note = 2'O-methyl uridine phosphorothioate
  modified_base 3: mod_base = OTHER; note = 2'O-methyl guanosine
  modified_base 4: mod_base = OTHER; note = 2'O-methyl cytidine
  modified_base 5: mod_base = OTHER; note = 2'O-methyl cytidine
  modified_base 6: mod_base = OTHER; note = 2'O-methyl adenosine
  modified_base 7: mod_base = OTHER; note = 2'-fluoro adenosine
  modified_base 8: mod_base = OTHER; note = 2'O-methyl adenosine
  modified_base 9: mod_base = OTHER; note = 2'-fluoro adenosine
  modified_base 10: mod_base = OTHER; note = 2'-fluoro-2-Pyridone
  modified_base 11: mod_base = OTHER; note = 2'-fluoro adenosine
  modified_base 12: mod_base = OTHER; note = 2'O-methyl adenosine
  modified_base 13: mod_base = OTHER; note = 2'O-methyl cytidine
  modified_base 14: mod_base = OTHER; note = 2'O-methyl cytidine
  modified_base 15: mod_base = OTHER; note = 2'O-methyl adenosine
  modified_base 16: mod_base = OTHER; note = 2'O-methyl uridine
  modified_base 17: mod_base = OTHER; note = 2'O-methyl cytidine
  modified_base 18: mod_base = OTHER; note = 2'O-methyl adenosine
  modified_base 19: mod_base = OTHER; note = 2'O-methyl cytidine
  modified_base 20: mod_base = OTHER; note = 2'O-methyl cytidine
  modified_base 21: mod_base = OTHER; note = 2'O-methyl uridine 6-(5-(((2R,3R,4R,5R,6R)-3-acetamido-4,5-dihydroxy-6-(hydrox ymethyl)tetrahydro-2H-pyran-2-yl)oxy)pentanamido)-N-(6-(4-( hydroxymethyl)-4-(methoxymethyl)piperidin-1-yl)-6-oxohexyl) hexanamide-phosphorothioate-6-(5-(((2R,3R,4R,5R,6R)-3-aceta mido-4,5-dihydroxy-6-(hydroxymethyl)tetrahydro-2H-pyran-2-y l)oxy)pentanamido)-N-(6-(4-(hydroxymethyl)-4-(methoxymethyl )piperidin-1-yl)-6-oxohexyl)hexanamide-phosphorothioate-6-( 5-(((2R,3R,4R,5R,6R)-3-acetamido-4,5-dihydroxy-6-(hydroxyme thyl)tetrahydro-2H-pyran-2-yl)oxy)pentanamido)-N-(6-(4-(hyd roxymethyl)-4-(methoxymethyl)piperidin-1-yl)-6-oxohexyl)hex anamide
atgccaaaanaaccatcacct

SEQ ID NO: 2283 - RNA, 21 nt, synthetic construct
  source 1..21: mol_type = other RNA
  modified_base 1: mod_base = OTHER; note = 2'O-methyl guanosine phosphorothioate
  modified_base 2: mod_base = OTHER; note = 2'O-methyl adenosine phosphorothioate
  modified_base 3: mod_base = OTHER; note = 2'O-methyl adenosine
  modified_base 4: mod_base = OTHER; note = 2'O-methyl guanosine
  modified_base 5: mod_base = OTHER; note = 2'O-methyl uridine
  modified_base 6: mod_base = OTHER; note = 2'O-methyl cytidine
  modified_base 7: mod_base = OTHER; note = 2'-fluoro guanosine
  modified_base 8: mod_base = OTHER; note = 2'O-methyl uridine
  modified_base 9: mod_base = OTHER; note = 2'-fluoro guanosine
  modified_base 10: mod_base = OTHER; note = 2'-fluoro guanosine
  modified_base 11: mod_base = OTHER; note = 2'-fluoro adenosine
  modified_base 12: mod_base = OTHER; note = 2'O-methyl uridine
  modified_base 13: mod_base = OTHER; note = 2'O-methyl guanosine
  modified_base 14: mod_base = OTHER; note = 2'O-methyl cytidine
  modified_base 15: mod_base = OTHER; note = 2'O-methyl cytidine
  modified_base 16: mod_base = OTHER; note = 2'O-methyl uridine
  modified_base 17: mod_base = OTHER; note = 2'O-methyl uridine
  modified_base 18: mod_base = OTHER; note = 2'O-methyl guanosine
  modified_base 19: mod_base = OTHER; note = 2'O-methyl guanosine
  modified_base 20: mod_base = OTHER; note = 2'O-methyl uridine
  modified_base 21: mod_base = OTHER; note = 2'O-methyl adenosine 6-(5-(((2R,3R,4R,5R,6R)-3-acetamido-4,5-dihydroxy-6-(hydrox ymethyl)tetrahydro-2H-pyran-2-yl)oxy)pentanamido)-N-(6-(4-( hydroxymethyl)-4-(methoxymethyl)piperidin-1-yl)-6-oxohexyl) hexanamide-phosphorothioate-6-(5-(((2R,3R,4R,5R,6R)-3-aceta mido-4,5-dihydroxy-6-(hydroxymethyl)tetrahydro-2H-pyran-2-y l)oxy)pentanamido)-N-(6-(4-(hydroxymethyl)-4-(methoxymethyl )piperidin-1-yl)-6-oxohexyl)hexanamide-phosphorothioate-6-( 5-(((2R,3R,4R,5R,6R)-3-acetamido-4,5-dihydroxy-6-(hydroxyme thyl)tetrahydro-2H-pyran-2-yl)oxy)pentanamido)-N-(6-(4-(hyd roxymethyl)-4-(methoxymethyl)piperidin-1-yl)-6-oxohexyl)hex anamide
gaagtcgtggatgccttggta

SEQ ID NO: 2284 - RNA, 21 nt, synthetic construct
  source 1..21: mol_type = other RNA
  modified_base 1: mod_base = OTHER; note = 2'O-methyl guanosine phosphorothioate
  modified_base 2: mod_base = OTHER; note = 2'O-methyl adenosine phosphorothioate
  modified_base 3: mod_base = OTHER; note = 2'O-methyl adenosine
  modified_base 4: mod_base = OTHER; note = 2'O-methyl guanosine
  modified_base 5: mod_base = OTHER; note = 2'O-methyl uridine
  modified_base 6: mod_base = OTHER; note = 2'O-methyl cytidine
  modified_base 7: mod_base = OTHER; note = 2'-fluoro guanosine
  modified_base 8: mod_base = OTHER; note = 2'O-methyl uridine
  modified_base 9: mod_base = OTHER; note = 2'-fluoro guanosine
  modified_base 10: mod_base = OTHER; note = 2'-fluoro guanosine
  modified_base 11: mod_base = OTHER; note = 2'-fluoro adenosine
  modified_base 12: mod_base = OTHER; note = 2'O-methyl uridine
  modified_base 13: mod_base = OTHER; note = 2'O-methyl guanosine
  modified_base 14: mod_base = OTHER; note = 2'O-methyl cytidine
  modified_base 15: mod_base = OTHER; note = 2'O-methyl cytidine
  modified_base 16: mod_base = OTHER; note = 2'O-methyl uridine
  modified_base 17: mod_base = OTHER; note = 2'O-methyl uridine
  modified_base 18: mod_base = OTHER; note = 2'O-methyl guanosine
  modified_base 19: mod_base = OTHER; note = 2'O-methyl guanosine
  modified_base 20: mod_base = OTHER; note = 2'O-methyl uridine
  modified_base 21: mod_base = OTHER; note = 2'O-methyl adenosine 6-(5-(((2R,3R,4R,5R,6R)-3-acetamido-4,5-dihydroxy-6-(hydrox ymethyl)tetrahydro-2H-pyran-2-yl)oxy)pentanamido)-N-(6-(4-( hydroxymethyl)-4-(methoxymethyl)piperidin-1-yl)-6-oxohexyl) hexanamide-phosphorothioate-6-(5-(((2R,3R,4R,5R,6R)-3-aceta mido-4,5-dihydroxy-6-(hydroxymethyl)tetrahydro-2H-pyran-2-y l)oxy)pentanamido)-N-(6-(4-(hydroxymethyl)-4-(methoxymethyl )piperidin-1-yl)-6-oxohexyl)hexanamide-phosphorothioate-6-( 5-(((2R,3R,4R,5R,6R)-3-acetamido-4,5-dihydroxy-6-(hydroxyme thyl)tetrahydro-2H-pyran-2-yl)oxy)pentanamido)-N-(6-(4-(hyd roxymethyl)-4-(methoxymethyl)piperidin-1-yl)-6-oxohexyl)hex anamide
gaagtcgtggatgccttggta

SEQ ID NO: 2285 - RNA, 21 nt, synthetic construct
  source 1..21: mol_type = other RNA
  modified_base 1: mod_base = OTHER; note = 2'O-methyl guanosine phosphorothioate
  modified_base 2: mod_base = OTHER; note = 2'O-methyl adenosine phosphorothioate
  modified_base 3: mod_base = OTHER; note = 2'O-methyl adenosine
  modified_base 4: mod_base = OTHER; note = 2'O-methyl guanosine
  modified_base 5: mod_base = OTHER; note = 2'O-methyl uridine
  modified_base 6: mod_base = OTHER; note = 2'O-methyl cytidine
  modified_base 7: mod_base = OTHER; note = 2'-fluoro guanosine
  modified_base 8: mod_base = OTHER; note = 2'O-methyl uridine
  modified_base 9: mod_base = OTHER; note = 2'-fluoro guanosine
  modified_base 10: mod_base = OTHER; note = 2'-fluoro guanosine
  modified_base 11: mod_base = OTHER; note = 2'-fluoro adenosine
  modified_base 12: mod_base = OTHER; note = 2'O-methyl uridine
  modified_base 13: mod_base = OTHER; note = 2'O-methyl guanosine
  modified_base 14: mod_base = OTHER; note = 2'O-methyl cytidine
  modified_base 15: mod_base = OTHER; note = 2'O-methyl cytidine
  modified_base 16: mod_base = OTHER; note = 2'O-methyl uridine
  modified_base 17: mod_base = OTHER; note = 2'O-methyl uridine
  modified_base 18: mod_base = OTHER; note = 2'O-methyl guanosine
  modified_base 19: mod_base = OTHER; note = 2'O-methyl guanosine
  modified_base 20: mod_base = OTHER; note = 2'O-methyl uridine
  modified_base 21: mod_base = OTHER; note = 2'O-methyl uridine 6-(5-(((2R,3R,4R,5R,6R)-3-acetamido-4,5-dihydroxy-6-(hydrox ymethyl)tetrahydro-2H-pyran-2-yl)oxy)pentanamido)-N-(6-(4-( hydroxymethyl)-4-(methoxymethyl)piperidin-1-yl)-6-oxohexyl) hexanamide-phosphorothioate-6-(5-(((2R,3R,4R,5R,6R)-3-aceta mido-4,5-dihydroxy-6-(hydroxymethyl)tetrahydro-2H-pyran-2-y l)oxy)pentanamido)-N-(6-(4-(hydroxymethyl)-4-(methoxymethyl )piperidin-1-yl)-6-oxohexyl)hexanamide-phosphorothioate-6-( 5-(((2R,3R,4R,5R,6R)-3-acetamido-4,5-dihydroxy-6-(hydroxyme thyl)tetrahydro-2H-pyran-2-yl)oxy)pentanamido)-N-(6-(4-(hyd roxymethyl)-4-(methoxymethyl)piperidin-1-yl)-6-oxohexyl)hex anamide
gaagtcgtggatgccttggtt

SEQ ID NO: 2286 - RNA, 21 nt, synthetic construct
  source 1..21: mol_type = other RNA
  modified_base 1: mod_base = OTHER; note = 2'O-methyl guanosine phosphorothioate
  modified_base 2: mod_base = OTHER; note = 2'O-methyl adenosine phosphorothioate
  modified_base 3: mod_base = OTHER; note = 2'O-methyl adenosine
  modified_base 4: mod_base = OTHER; note = 2'O-methyl guanosine
  modified_base 5: mod_base = OTHER; note = 2'O-methyl uridine
  modified_base 6: mod_base = OTHER; note = 2'O-methyl cytidine
  modified_base 7: mod_base = OTHER; note = 2'-fluoro guanosine
  modified_base 8: mod_base = OTHER; note = 2'O-methyl uridine
  modified_base 9: mod_base = OTHER; note = 2'-fluoro guanosine
  modified_base 10: mod_base = OTHER; note = 2'-fluoro guanosine
  modified_base 11: mod_base = OTHER; note = 2'-fluoro cytidine
  modified_base 12: mod_base = OTHER; note = 2'O-methyl uridine
  modified_base 13: mod_base = OTHER; note = 2'O-methyl guanosine
  modified_base 14: mod_base = OTHER; note = 2'O-methyl cytidine
  modified_base 15: mod_base = OTHER; note = 2'O-methyl cytidine
  modified_base 16: mod_base = OTHER; note = 2'O-methyl uridine
  modified_base 17: mod_base = OTHER; note = 2'O-methyl uridine
  modified_base 18: mod_base = OTHER; note = 2'O-methyl guanosine
  modified_base 19: mod_base = OTHER; note = 2'O-methyl guanosine
  modified_base 20: mod_base = OTHER; note = 2'O-methyl uridine
  modified_base 21: mod_base = OTHER; note = 2'O-methyl adenosine 6-(5-(((2R,3R,4R,5R,6R)-3-acetamido-4,5-dihydroxy-6-(hydrox ymethyl)tetrahydro-2H-pyran-2-yl)oxy)pentanamido)-N-(6-(4-( hydroxymethyl)-4-(methoxymethyl)piperidin-1-yl)-6-oxohexyl) hexanamide-phosphorothioate-6-(5-(((2R,3R,4R,5R,6R)-3-aceta mido-4,5-dihydroxy-6-(hydroxymethyl)tetrahydro-2H-pyran-2-y l)oxy)pentanamido)-N-(6-(4-(hydroxymethyl)-4-(methoxymethyl )piperidin-1-yl)-6-oxohexyl)hexanamide-phosphorothioate-6-( 5-(((2R,3R,4R,5R,6R)-3-acetamido-4,5-dihydroxy-6-(hydroxyme thyl)tetrahydro-2H-pyran-2-yl)oxy)pentanamido)-N-(6-(4-(hyd roxymethyl)-4-(methoxymethyl)piperidin-1-yl)-6-oxohexyl)hex anamide
gaagtcgtggctgccttggta

SEQ ID NO: 2287 - RNA, 21 nt, synthetic construct
  source 1..21: mol_type = other RNA
  modified_base 1: mod_base = OTHER; note = 2'O-methyl guanosine phosphorothioate
  modified_base 2: mod_base = OTHER; note = 2'O-methyl adenosine phosphorothioate
  modified_base 3: mod_base = OTHER; note = 2'O-methyl adenosine
  modified_base 4: mod_base = OTHER; note = 2'O-methyl guanosine
  modified_base 5: mod_base = OTHER; note = 2'O-methyl uridine
  modified_base 6: mod_base = OTHER; note = 2'O-methyl cytidine
  modified_base 7: mod_base = OTHER; note = 2'-fluoro guanosine
  modified_base 8: mod_base = OTHER; note = 2'O-methyl uridine
  modified_base 9: mod_base = OTHER; note = 2'-fluoro guanosine
  modified_base 10: mod_base = OTHER; note = 2'-fluoro guanosine
  modified_base 11: mod_base = OTHER; note = 2'-fluoro adenosine
  modified_base 12: mod_base = OTHER; note = 2'O-methyl uridine
  modified_base 13: mod_base = OTHER; note = 2'O-methyl guanosine
  modified_base 14: mod_base = OTHER; note = 2'O-methyl cytidine
  modified_base 15: mod_base = OTHER; note = 2'O-methyl cytidine
  modified_base 16: mod_base = OTHER; note = 2'O-methyl uridine
  modified_base 17: mod_base = OTHER; note = 2'O-methyl uridine
  modified_base 18: mod_base = OTHER; note = 2'O-methyl guanosine
  modified_base 19: mod_base = OTHER; note = 2'-OMe-3',4'-seco-guanosine
  modified_base 20: mod_base = OTHER; note = 2'O-methyl uridine
  modified_base 21: mod_base = OTHER; note = 2'O-methyl adenosine 6-(5-(((2R,3R,4R,5R,6R)-3-acetamido-4,5-dihydroxy-6-(hydrox ymethyl)tetrahydro-2H-pyran-2-yl)oxy)pentanamido)-N-(6-(4-( hydroxymethyl)-4-(methoxymethyl)piperidin-1-yl)-6-oxohexyl) hexanamide-phosphorothioate-6-(5-(((2R,3R,4R,5R,6R)-3-aceta mido-4,5-dihydroxy-6-(hydroxymethyl)tetrahydro-2H-pyran-2-y l)oxy)pentanamido)-N-(6-(4-(hydroxymethyl)-4-(methoxymethyl )piperidin-1-yl)-6-oxohexyl)hexanamide-phosphorothioate-6-( 5-(((2R,3R,4R,5R,6R)-3-acetamido-4,5-dihydroxy-6-(hydroxyme thyl)tetrahydro-2H-pyran-2-yl)oxy)pentanamido)-N-(6-(4-(hyd roxymethyl)-4-(methoxymethyl)piperidin-1-yl)-6-oxohexyl)hex anamide
gaagtcgtggatgccttggta

SEQ ID NO: 2288 - RNA, 21 nt, synthetic construct
  source 1..21: mol_type = other RNA
  modified_base 1: mod_base = OTHER; note = 2'O-methyl guanosine phosphorothioate
  modified_base 2: mod_base = OTHER; note = 2'O-methyl adenosine phosphorothioate
  modified_base 3: mod_base = OTHER; note = 2'O-methyl adenosine
  modified_base 4: mod_base = OTHER; note = 2'O-methyl guanosine
  modified_base 5: mod_base = OTHER; note = 2'O-methyl uridine
  modified_base 6: mod_base = OTHER; note = 2'O-methyl cytidine
  modified_base 7: mod_base = OTHER; note = 2'-fluoro guanosine
  modified_base 8: mod_base = OTHER; note = 2'O-methyl uridine
  modified_base 9: mod_base = OTHER; note = 2'-fluoro guanosine
  modified_base 10: mod_base = OTHER; note = 2'-fluoro guanosine
  modified_base 11: mod_base = OTHER; note = 2'-fluoro adenosine
  modified_base 12: mod_base = OTHER; note = 2'O-methyl uridine
  modified_base 13: mod_base = OTHER; note = 2'O-methyl guanosine
  modified_base 14: mod_base = OTHER; note = 2'O-methyl cytidine
  modified_base 15: mod_base = OTHER; note = 2'O-methyl cytidine
  modified_base 16: mod_base = OTHER; note = 2'O-methyl uridine
  modified_base 17: mod_base = OTHER; note = 2'O-methyl uridine
  modified_base 18: mod_base = OTHER; note = 2'O-methyl guanosine
  modified_base 19: mod_base = OTHER; note = 2'O-methyl guanosine
  modified_base 20: mod_base = OTHER; note = 2'O-methyl uridine
  modified_base 21: mod_base = OTHER; note = 2'O-methyl uridine 6-(5-(((2R,3R,4R,5R,6R)-3-acetamido-4,5-dihydroxy-6-(hydrox ymethyl)tetrahydro-2H-pyran-2-yl)oxy)pentanamido)-N-(6-(4-( hydroxymethyl)-4-(methoxymethyl)piperidin-1-yl)-6-oxohexyl) hexanamide-phosphorothioate-6-(5-(((2R,3R,4R,5R,6R)-3-aceta mido-4,5-dihydroxy-6-(hydroxymethyl)tetrahydro-2H-pyran-2-y l)oxy)pentanamido)-N-(6-(4-(hydroxymethyl)-4-(methoxymethyl )piperidin-1-yl)-6-oxohexyl)hexanamide-phosphorothioate-6-( 5-(((2R,3R,4R,5R,6R)-3-acetamido-4,5-dihydroxy-6-(hydroxyme thyl)tetrahydro-2H-pyran-2-yl)oxy)pentanamido)-N-(6-(4-(hyd roxymethyl)-4-(methoxymethyl)piperidin-1-yl)-6-oxohexyl)hex anamide
gaagtcgtggatgccttggtt

SEQ ID NO: 2289 - RNA, 21 nt, synthetic construct
  source 1..21: mol_type = other RNA
  modified_base 1: mod_base = OTHER; note = 2'O-methyl guanosine phosphorothioate
  modified_base 2: mod_base = OTHER; note = 2'O-methyl adenosine phosphorothioate
  modified_base 3: mod_base = OTHER; note = 2'O-methyl adenosine
  modified_base 4: mod_base = OTHER; note = 2'O-methyl guanosine
  modified_base 5: mod_base = OTHER; note = 2'O-methyl uridine
  modified_base 6: mod_base = OTHER; note = 2'O-methyl cytidine
  modified_base 7: mod_base = OTHER; note = 2'-fluoro guanosine
  modified_base 8: mod_base = OTHER; note = 2'O-methyl uridine
  modified_base 9: mod_base = OTHER; note = 2'-fluoro guanosine
  modified_base 10: mod_base = OTHER; note = 2'-fluoro guanosine
  modified_base 11: mod_base = OTHER; note = 2'-fluoro cytidine
  modified_base 12: mod_base = OTHER; note = 2'O-methyl uridine
  modified_base 13: mod_base = OTHER; note = 2'O-methyl guanosine
  modified_base 14: mod_base = OTHER; note = 2'O-methyl cytidine
  modified_base 15: mod_base = OTHER; note = 2'O-methyl cytidine
  modified_base 16: mod_base = OTHER; note = 2'O-methyl uridine
  modified_base 17: mod_base = OTHER; note = 2'O-methyl uridine
  modified_base 18: mod_base = OTHER; note = 2'O-methyl guanosine
  modified_base 19: mod_base = OTHER; note = 2'O-methyl guanosine
  modified_base 20: mod_base = OTHER; note = 2'O-methyl uridine
  modified_base 21: mod_base = OTHER; note = 2'O-methyl adenosine 6-(5-(((2R,3R,4R,5R,6R)-3-acetamido-4,5-dihydroxy-6-(hydrox ymethyl)tetrahydro-2H-pyran-2-yl)oxy)pentanamido)-N-(6-(4-( hydroxymethyl)-4-(methoxymethyl)piperidin-1-yl)-6-oxohexyl) hexanamide-phosphorothioate-6-(5-(((2R,3R,4R,5R,6R)-3-aceta mido-4,5-dihydroxy-6-(hydroxymethyl)tetrahydro-2H-pyran-2-y l)oxy)pentanamido)-N-(6-(4-(hydroxymethyl)-4-(methoxymethyl )piperidin-1-yl)-6-oxohexyl)hexanamide-phosphorothioate-6-( 5-(((2R,3R,4R,5R,6R)-3-acetamido-4,5-dihydroxy-6-(hydroxyme thyl)tetrahydro-2H-pyran-2-yl)oxy)pentanamido)-N-(6-(4-(hyd roxymethyl)-4-(methoxymethyl)piperidin-1-yl)-6-oxohexyl)hex anamide
gaagtcgtggctgccttggta

SEQ ID NO: 2290 - RNA, 21 nt, synthetic construct
  source 1..21: mol_type = other RNA
  modified_base 1: mod_base = OTHER; note = 2'O-methyl guanosine phosphorothioate
  modified_base 2: mod_base = OTHER; note = 2'O-methyl adenosine phosphorothioate
  modified_base 3: mod_base = OTHER; note = 2'O-methyl adenosine
  modified_base 4: mod_base = OTHER; note = 2'O-methyl guanosine
  modified_base 5: mod_base = OTHER; note = 2'O-methyl uridine
  modified_base 6: mod_base = OTHER; note = 2'O-methyl cytidine
  modified_base 7: mod_base = OTHER; note = 2'-fluoro guanosine
  modified_base 8: mod_base = OTHER; note = 2'O-methyl uridine
  modified_base 9: mod_base = OTHER; note = 2'-fluoro guanosine
  modified_base 10: mod_base = OTHER; note = 2'-fluoro guanosine
  modified_base 11: mod_base = OTHER; note = 2'-fluoro adenosine
  modified_base 12: mod_base = OTHER; note = 2'O-methyl uridine
  modified_base 13: mod_base = OTHER; note = 2'O-methyl guanosine
  modified_base 14: mod_base = OTHER; note = 2'O-methyl cytidine
  modified_base 15: mod_base = OTHER; note = 2'O-methyl cytidine
  modified_base 16: mod_base = OTHER; note = 2'O-methyl uridine
  modified_base 17: mod_base = OTHER; note = 2'O-methyl uridine
  modified_base 18: mod_base = OTHER; note = 2'O-methyl guanosine
  modified_base 19: mod_base = OTHER; note = 2'-OMe-3',4'-seco-guanosine
  modified_base 20: mod_base = OTHER; note = 2'O-methyl uridine
  modified_base 21: mod_base = OTHER; note = 2'O-methyl adenosine 6-(5-(((2R,3R,4R,5R,6R)-3-acetamido-4,5-dihydroxy-6-(hydrox ymethyl)tetrahydro-2H-pyran-2-yl)oxy)pentanamido)-N-(6-(4-( hydroxymethyl)-4-(methoxymethyl)piperidin-1-yl)-6-oxohexyl) hexanamide-phosphorothioate-6-(5-(((2R,3R,4R,5R,6R)-3-aceta mido-4,5-dihydroxy-6-(hydroxymethyl)tetrahydro-2H-pyran-2-y l)oxy)pentanamido)-N-(6-(4-(hydroxymethyl)-4-(methoxymethyl )piperidin-1-yl)-6-oxohexyl)hexanamide-phosphorothioate-6-( 5-(((2R,3R,4R,5R,6R)-3-acetamido-4,5-dihydroxy-6-(hydroxyme thyl)tetrahydro-2H-pyran-2-yl)oxy)pentanamido)-N-(6-(4-(hyd roxymethyl)-4-(methoxymethyl)piperidin-1-yl)-6-oxohexyl)hex anamide
gaagtcgtggatgccttggta

SEQ ID NO: 2291 - RNA, 21 nt, synthetic construct
  source 1..21: mol_type = other RNA
  modified_base 1: mod_base = OTHER; note = 2'O-methyl guanosine phosphorothioate
  modified_base 2: mod_base = OTHER; note = 2'O-methyl uridine phosphorothioate
  modified_base 3: mod_base = OTHER; note = 2'O-methyl cytidine
  modified_base 4: mod_base = OTHER; note = 2'O-methyl guanosine
  modified_base 5: mod_base = OTHER; note = 2'O-methyl uridine
  modified_base 6: mod_base = OTHER; note = 2'O-methyl guanosine
  modified_base 7: mod_base = OTHER; note = 2'-fluoro guanosine
  modified_base 8: mod_base = OTHER; note = 2'O-methyl adenosine
  modified_base 9: mod_base = OTHER; note = 2'-fluoro uridine
  modified_base 10: mod_base = OTHER; note = 2'-fluoro guanosine
  modified_base 11: mod_base = OTHER; note = 2'-fluoro cytidine
  modified_base 12: mod_base = OTHER; note = 2'O-methyl cytidine
  modified_base 13: mod_base = OTHER; note = 2'O-methyl uridine
  modified_base 14: mod_base = OTHER; note = 2'O-methyl uridine
  modified_base 15: mod_base = OTHER; note = 2'O-methyl guanosine
  modified_base 16: mod_base = OTHER; note = 2'O-methyl guanosine
  modified_base 17: mod_base = OTHER; note = 2'O-methyl uridine
  modified_base 18: mod_base = OTHER; note = 2'O-methyl adenosine
  modified_base 19: mod_base = OTHER; note = 2'O-methyl uridine
  modified_base 20: mod_base = OTHER; note = 2'O-methyl guanosine
  modified_base 21: mod_base = OTHER; note = 2'O-methyl uridine 6-(5-(((2R,3R,4R,5R,6R)-3-acetamido-4,5-dihydroxy-6-(hydrox ymethyl)tetrahydro-2H-pyran-2-yl)oxy)pentanamido)-N-(6-(4-( hydroxymethyl)-4-(methoxymethyl)piperidin-1-yl)-6-oxohexyl) hexanamide-phosphorothioate-6-(5-(((2R,3R,4R,5R,6R)-3-aceta mido-4,5-dihydroxy-6-(hydroxymethyl)tetrahydro-2H-pyran-2-y l)oxy)pentanamido)-N-(6-(4-(hydroxymethyl)-4-(methoxymethyl )piperidin-1-yl)-6-oxohexyl)hexanamide-phosphorothioate-6-( 5-(((2R,3R,4R,5R,6R)-3-acetamido-4,5-dihydroxy-6-(hydroxyme thyl)tetrahydro-2H-pyran-2-yl)oxy)pentanamido)-N-(6-(4-(hyd roxymethyl)-4-(methoxymethyl)piperidin-1-yl)-6-oxohexyl)hex anamide
gtcgtggatgccttggtatgt

SEQ ID NO: 2292 - RNA, 21 nt, synthetic construct
  source 1..21: mol_type = other RNA
  modified_base 1: mod_base = OTHER; note = 2'O-methyl uridine phosphorothioate
  modified_base 2: mod_base = OTHER; note = 2'O-methyl cytidine phosphorothioate
  modified_base 3: mod_base = OTHER; note = 2'O-methyl guanosine
  modified_base 4: mod_base = OTHER; note = 2'O-methyl uridine
  modified_base 5: mod_base = OTHER; note = 2'O-methyl guanosine
  modified_base 6: mod_base = OTHER; note = 2'O-methyl guanosine
  modified_base 7: mod_base = OTHER; note = 2'-fluoro adenosine
  modified_base 8: mod_base = OTHER; note = 2'O-methyl uridine
  modified_base 9: mod_base = OTHER; note = 2'-fluoro guanosine
  modified_base 10: mod_base = OTHER; note = 2'-fluoro cytidine
  modified_base 11: mod_base = OTHER; note = 2'-fluoro cytidine
  modified_base 12: mod_base = OTHER; note = 2'O-methyl uridine
  modified_base 13: mod_base = OTHER; note = 2'O-methyl uridine
  modified_base 14: mod_base = OTHER; note = 2'O-methyl guanosine
  modified_base 15: mod_base = OTHER; note = 2'O-methyl guanosine
  modified_base 16: mod_base = OTHER; note = 2'O-methyl uridine
  modified_base 17: mod_base = OTHER; note = 2'O-methyl adenosine
  modified_base 18: mod_base = OTHER; note = 2'O-methyl uridine
  modified_base 19: mod_base = OTHER; note = 2'O-methyl guanosine
  modified_base 20: mod_base = OTHER; note = 2'O-methyl uridine
  modified_base 21: mod_base = OTHER; note = 2'O-methyl uridine 6-(5-(((2R,3R,4R,5R,6R)-3-acetamido-4,5-dihydroxy-6-(hydrox ymethyl)tetrahydro-2H-pyran-2-yl)oxy)pentanamido)-N-(6-(4-( hydroxymethyl)-4-(methoxymethyl)piperidin-1-yl)-6-oxohexyl) hexanamide-phosphorothioate-6-(5-(((2R,3R,4R,5R,6R)-3-aceta mido-4,5-dihydroxy-6-(hydroxymethyl)tetrahydro-2H-pyran-2-y l)oxy)pentanamido)-N-(6-(4-(hydroxymethyl)-4-(methoxymethyl )piperidin-1-yl)-6-oxohexyl)hexanamide-phosphorothioate-6-( 5-(((2R,3R,4R,5R,6R)-3-acetamido-4,5-dihydroxy-6-(hydroxyme thyl)tetrahydro-2H-pyran-2-yl)oxy)pentanamido)-N-(6-(4-(hyd roxymethyl)-4-(methoxymethyl)piperidin-1-yl)-6-oxohexyl)hex anamide
tcgtggatgccttggtatgtt

SEQ ID NO: 2293 - RNA, 19 nt, synthetic construct
  source 1..19: mol_type = other RNA
  modified_base 1: mod_base = OTHER; note = 2'O-methyl adenosine phosphorothioate
  modified_base 2: mod_base = OTHER; note = 2'O-methyl uridine phosphorothioate
  modified_base 3: mod_base = OTHER; note = 2'O-methyl guanosine
  modified_base 4: mod_base = OTHER; note = 2'O-methyl guanosine
  modified_base 5: mod_base = OTHER; note = 2'-fluoro adenosine
  modified_base 6: mod_base = OTHER; note = 2'O-methyl guanosine
  modified_base 7: mod_base = OTHER; note = 2'-fluoro guanosine
  modified_base 8: mod_base = OTHER; note = 2'-fluoro adenosine
  modified_base 9: mod_base = OTHER; note = 2'-fluoro guanosine
  modified_base 10: mod_base = OTHER; note = 2'O-methyl uridine
  modified_base 11: mod_base = OTHER; note = 2'O-methyl guanosine
  modified_base 12: mod_base = OTHER; note = 2'O-methyl adenosine
  modified_base 13: mod_base = OTHER; note = 2'O-methyl guanosine
  modified_base 14: mod_base = OTHER; note = 2'O-methyl uridine
  modified_base 15: mod_base = OTHER; note = 2'O-methyl guanosine
  modified_base 16: mod_base = OTHER; note = 2'O-methyl adenosine
  modified_base 17: mod_base = OTHER; note = 2'O-methyl cytidine
  modified_base 18: mod_base = OTHER; note = 2'O-methyl adenosine
  modified_base 19: mod_base = OTHER; note = 2'O-methyl adenosine 6-(5-(((2R,3R,4R,5R,6R)-3-acetamido-4,5-dihydroxy-6-(hydrox ymethyl)tetrahydro-2H-pyran-2-yl)oxy)pentanamido)-N-(6-(4-( hydroxymethyl)-4-(methoxymethyl)piperidin-1-yl)-6-oxohexyl) hexanamide-phosphorothioate-6-(5-(((2R,3R,4R,5R,6R)-3-aceta mido-4,5-dihydroxy-6-(hydroxymethyl)tetrahydro-2H-pyran-2-y l)oxy)pentanamido)-N-(6-(4-(hydroxymethyl)-4-(methoxymethyl )piperidin-1-yl)-6-oxohexyl)hexanamide-phosphorothioate-6-( 5-(((2R,3R,4R,5R,6R)-3-acetamido-4,5-dihydroxy-6-(hydroxyme thyl)tetrahydro-2H-pyran-2-yl)oxy)pentanamido)-N-(6-(4-(hyd roxymethyl)-4-(methoxymethyl)piperidin-1-yl)-6-oxohexyl)hex anamide
atggaggagtgagtgacaa

SEQ ID NO: 2294 - RNA, 21 nt, synthetic construct
  source 1..21: mol_type = other RNA
  modified_base 1: mod_base = OTHER; note = 2'O-methyl adenosine phosphorothioate
  modified_base 2: mod_base = OTHER; note = 2'O-methyl uridine phosphorothioate
  modified_base 3: mod_base = OTHER; note = 2'O-methyl guanosine
  modified_base 4: mod_base = OTHER; note = 2'O-methyl cytidine
  modified_base 5: mod_base = OTHER; note = 2'O-methyl cytidine
  modified_base 6: mod_base = OTHER; note = 2'O-methyl adenosine
  modified_base 7: mod_base = OTHER; note = 2'-fluoro adenosine
  modified_base 8: mod_base = OTHER; note = 2'O-methyl adenosine
  modified_base 9: mod_base = OTHER; note = 2'-fluoro adenosine
  modified_base 10: mod_base = OTHER; note = 2'-fluoro cytidine
  modified_base 11: mod_base = OTHER; note = 2'-fluoro adenosine
  modified_base 12: mod_base = OTHER; note = 2'O-methyl adenosine
  modified_base 13: mod_base = OTHER; note = 2'O-methyl cytidine
  modified_base 14: mod_base = OTHER; note = 2'O-methyl cytidine
  modified_base 15: mod_base = OTHER; note = 2'O-methyl adenosine
  modified_base 16: mod_base = OTHER; note = 2'O-methyl uridine
  modified_base 17: mod_base = OTHER; note = 2'O-methyl cytidine
  modified_base 18: mod_base = OTHER; note = 2'O-methyl adenosine
  modified_base 19: mod_base = OTHER; note = 2'O-methyl cytidine
  modified_base 20: mod_base = OTHER; note = 2'O-methyl cytidine
  modified_base 21: mod_base = OTHER; note = 2'O-methyl guanosine 6-(5-(((2R,3R,4R,5R,6R)-3-acetamido-4,5-dihydroxy-6-(hydrox ymethyl)tetrahydro-2H-pyran-2-yl)oxy)pentanamido)-N-(6-(4-( hydroxymethyl)-4-(methoxymethyl)piperidin-1-yl)-6-oxohexyl) hexanamide-phosphorothioate-6-(5-(((2R,3R,4R,5R,6R)-3-aceta mido-4,5-dihydroxy-6-(hydroxymethyl)tetrahydro-2H-pyran-2-y l)oxy)pentanamido)-N-(6-(4-(hydroxymethyl)-4-(methoxymethyl )piperidin-1-yl)-6-oxohexyl)hexanamide-phosphorothioate-6-( 5-(((2R,3R,4R,5R,6R)-3-acetamido-4,5-dihydroxy-6-(hydroxyme thyl)tetrahydro-2H-pyran-2-yl)oxy)pentanamido)-N-(6-(4-(hyd roxymethyl)-4-(methoxymethyl)piperidin-1-yl)-6-oxohexyl)hex anamide
atgccaaaacaaccatcaccg

SEQ ID NO: 2295 - RNA, 21 nt, synthetic construct
  source 1..21: mol_type = other RNA
  modified_base 1: mod_base = OTHER; note = 2'O-methyl guanosine phosphorothioate
  modified_base 2: mod_base = OTHER; note = 2'O-methyl adenosine phosphorothioate
  modified_base 3: mod_base = OTHER; note = 2'O-methyl adenosine
  modified_base 4: mod_base = OTHER; note = 2'O-methyl guanosine
  modified_base 5: mod_base = OTHER; note = 2'-fluoro uridine
  modified_base 6: mod_base = OTHER; note = 2'O-methyl cytidine
  modified_base 7: mod_base = OTHER; note = 2'O-methyl guanosine
  modified_base 8: mod_base = OTHER; note = 2'O-methyl uridine
  modified_base 9: mod_base = OTHER; note = 2'-fluoro guanosine
  modified_base 10: mod_base = OTHER; note = 2'-fluoro guanosine
  modified_base 11: mod_base = OTHER; note = 2'-fluoro adenosine
  modified_base 12: mod_base = OTHER; note = 2'O-methyl uridine
  modified_base 13: mod_base = OTHER; note = 2'O-methyl guanosine
  modified_base 14: mod_base = OTHER; note = 2'-fluoro cytidine
  modified_base 15: mod_base = OTHER; note = 2'O-methyl cytidine
  modified_base 16: mod_base = OTHER; note = 2'O-methyl uridine
  modified_base 17: mod_base = OTHER; note = 2'O-methyl uridine
  modified_base 18: mod_base = OTHER; note = 2'O-methyl guanosine
  modified_base 19: mod_base = OTHER; note = 2'-fluoro guanosine
  modified_base 20: mod_base = OTHER; note = 2'O-methyl uridine
  modified_base 21: mod_base = OTHER; note = 2'O-methyl adenosine 6-(5-(((2R,3R,4R,5R,6R)-3-acetamido-4,5-dihydroxy-6-(hydrox ymethyl)tetrahydro-2H-pyran-2-yl)oxy)pentanamido)-N-(6-(4-( hydroxymethyl)-4-(methoxymethyl)piperidin-1-yl)-6-oxohexyl) hexanamide-phosphorothioate-6-(5-(((2R,3R,4R,5R,6R)-3-aceta mido-4,5-dihydroxy-6-(hydroxymethyl)tetrahydro-2H-pyran-2-y l)oxy)pentanamido)-N-(6-(4-(hydroxymethyl)-4-(methoxymethyl )piperidin-1-yl)-6-oxohexyl)hexanamide-phosphorothioate-6-( 5-(((2R,3R,4R,5R,6R)-3-acetamido-4,5-dihydroxy-6-(hydroxyme thyl)tetrahydro-2H-pyran-2-yl)oxy)pentanamido)-N-(6-(4-(hyd roxymethyl)-4-(methoxymethyl)piperidin-1-yl)-6-oxohexyl)hex anamide
gaagtcgtggatgccttggta

SEQ ID NO: 2296 - RNA, 21 nt, synthetic construct
  source 1..21: mol_type = other RNA
  modified_base 1: mod_base = OTHER; note = 2'O-methyl guanosine phosphorothioate
  modified_base 2: mod_base = OTHER; note = 2'O-methyl adenosine phosphorothioate
  modified_base 3: mod_base = OTHER; note = 2'O-methyl adenosine
  modified_base 4: mod_base = OTHER; note = 2'O-methyl guanosine
  modified_base 5: mod_base = OTHER; note = 2'-fluoro uridine
  modified_base 6: mod_base = OTHER; note = 2'O-methyl cytidine
  modified_base 7: mod_base = OTHER; note = 2'O-methyl guanosine
  modified_base 8: mod_base = OTHER; note = 2'O-methyl uridine
  modified_base 9: mod_base = OTHER; note = 2'-fluoro guanosine
  modified_base 10: mod_base = OTHER; note = 2'-fluoro guanosine
  modified_base 11: mod_base = OTHER; note = 2'-fluoro adenosine
  modified_base 12: mod_base = OTHER; note = 2'O-methyl uridine
  modified_base 13: mod_base = OTHER; note = 2'O-methyl guanosine
  modified_base 14: mod_base = OTHER; note = 2'-fluoro cytidine
  modified_base 15: mod_base = OTHER; note = 2'O-methyl cytidine
  modified_base 16: mod_base = OTHER; note = 2'O-methyl uridine
  modified_base 17: mod_base = OTHER; note = 2'O-methyl uridine
  modified_base 18: mod_base = OTHER; note = 2'O-methyl guanosine
  modified_base 19: mod_base = OTHER; note = 2'-fluoro guanosine
  modified_base 20: mod_base = OTHER; note = 2'O-methyl uridine
  modified_base 21: mod_base = OTHER; note = 2'O-methyl adenosine 6-(5-(((2R,3R,4R,5R,6R)-3-acetamido-4,5-dihydroxy-6-(hydrox ymethyl)tetrahydro-2H-pyran-2-yl)oxy)pentanamido)-N-(6-(4-( hydroxymethyl)-4-(methoxymethyl)piperidin-1-yl)-6-oxohexyl) hexanamide-phosphorothioate-6-(5-(((2R,3R,4R,5R,6R)-3-aceta mido-4,5-dihydroxy-6-(hydroxymethyl)tetrahydro-2H-pyran-2-y l)oxy)pentanamido)-N-(6-(4-(hydroxymethyl)-4-(methoxymethyl )piperidin-1-yl)-6-oxohexyl)hexanamide-phosphorothioate-6-( 5-(((2R,3R,4R,5R,6R)-3-acetamido-4,5-dihydroxy-6-(hydroxyme thyl)tetrahydro-2H-pyran-2-yl)oxy)pentanamido)-N-(6-(4-(hyd roxymethyl)-4-(methoxymethyl)piperidin-1-yl)-6-oxohexyl)hex anamide
gaagtcgtggatgccttggta

SEQ ID NO: 2297 - RNA, 21 nt, synthetic construct
  source 1..21: mol_type = other RNA
  modified_base 1: mod_base = OTHER; note = 2'O-methyl guanosine phosphorothioate
  modified_base 2: mod_base = OTHER; note = 2'O-methyl uridine phosphorothioate
  modified_base 3: mod_base = OTHER; note = 2'O-methyl guanosine
  modified_base 4: mod_base = OTHER; note = 2'O-methyl uridine
  modified_base 5: mod_base = OTHER; note = 2'O-methyl cytidine
  modified_base 6: mod_base = OTHER; note = 2'O-methyl uridine
  modified_base 7: mod_base = OTHER; note = 2'-fluoro guanosine
  modified_base 8: mod_base = OTHER; note = 2'O-methyl adenosine
  modified_base 9: mod_base = OTHER; note = 2'-fluoro cytidine
  modified_base 10: mod_base = OTHER; note = 2'-fluoro uridine
  modified_base 11: mod_base = OTHER; note = 2'-fluoro uridine
  modified_base 12: mod_base = OTHER; note = 2'O-methyl uridine
  modified_base 13: mod_base = OTHER; note = 2'O-methyl cytidine
  modified_base 14: mod_base = OTHER; note = 2'O-methyl guanosine
  modified_base 15: mod_base = OTHER; note = 2'O-methyl guanosine
  modified_base 16: mod_base = OTHER; note = 2'O-methyl uridine
  modified_base 17: mod_base = OTHER; note = 2'O-methyl cytidine
  modified_base 18: mod_base = OTHER; note = 2'O-methyl cytidine
  modified_base 19: mod_base = OTHER; note = 2'O-methyl adenosine
  modified_base 20: mod_base = OTHER; note = 2'O-methyl adenosine
  modified_base 21: mod_base = OTHER; note = 2'O-methyl adenosine 6-(5-(((2R,3R,4R,5R,6R)-3-acetamido-4,5-dihydroxy-6-(hydrox ymethyl)tetrahydro-2H-pyran-2-yl)oxy)pentanamido)-N-(6-(4-( hydroxymethyl)-4-(methoxymethyl)piperidin-1-yl)-6-oxohexyl) hexanamide-phosphorothioate-6-(5-(((2R,3R,4R,5R,6R)-3-aceta mido-4,5-dihydroxy-6-(hydroxymethyl)tetrahydro-2H-pyran-2-y l)oxy)pentanamido)-N-(6-(4-(hydroxymethyl)-4-(methoxymethyl )piperidin-1-yl)-6-oxohexyl)hexanamide-phosphorothioate-6-( 5-(((2R,3R,4R,5R,6R)-3-acetamido-4,5-dihydroxy-6-(hydroxyme thyl)tetrahydro-2H-pyran-2-yl)oxy)pentanamido)-N-(6-(4-(hyd roxymethyl)-4-(methoxymethyl)piperidin-1-yl)-6-oxohexyl)hex anamide
gtgtctgactttcggtccaaa

SEQ ID NO: 2298 - RNA, 21 nt, synthetic construct
  source 1..21: mol_type = other RNA
  modified_base 1: mod_base = OTHER; note = 2'O-methyl uridine phosphorothioate
  modified_base 2: mod_base = OTHER; note = 2'O-methyl cytidine phosphorothioate
  modified_base 3: mod_base = OTHER; note = 2'O-methyl cytidine
  modified_base 4: mod_base = OTHER; note = 2'O-methyl adenosine
  modified_base 5: mod_base = OTHER; note = 2'O-methyl adenosine
  modified_base 6: mod_base = OTHER; note = 2'O-methyl adenosine
  modified_base 7: mod_base = OTHER; note = 2'-fluoro guanosine
  modified_base 8: mod_base = OTHER; note = 2'O-methyl adenosine
  modified_base 9: mod_base = OTHER; note = 2'-fluoro cytidine
  modified_base 10: mod_base = OTHER; note = 2'-fluoro guanosine
  modified_base 11: mod_base = OTHER; note = 2'-fluoro adenosine
  modified_base 12: mod_base = OTHER; note = 2'O-methyl adenosine
  modified_base 13: mod_base = OTHER; note = 2'O-methyl guanosine
  modified_base 14: mod_base = OTHER; note = 2'O-methyl uridine
  modified_base 15: mod_base = OTHER; note = 2'O-methyl cytidine
  modified_base 16: mod_base = OTHER; note = 2'O-methyl guanosine
  modified_base 17: mod_base = OTHER; note = 2'O-methyl uridine
  modified_base 18: mod_base = OTHER; note = 2'O-methyl guanosine
  modified_base 19: mod_base = OTHER; note = 2'O-methyl guanosine
  modified_base 20: mod_base = OTHER; note = 2'O-methyl adenosine
  modified_base 21: mod_base = OTHER; note = 2'O-methyl uridine 6-(5-(((2R,3R,4R,5R,6R)-3-acetamido-4,5-dihydroxy-6-(hydrox ymethyl)tetrahydro-2H-pyran-2-yl)oxy)pentanamido)-N-(6-(4-( hydroxymethyl)-4-(methoxymethyl)piperidin-1-yl)-6-oxohexyl) hexanamide-phosphorothioate-6-(5-(((2R,3R,4R,5R,6R)-3-aceta mido-4,5-dihydroxy-6-(hydroxymethyl)tetrahydro-2H-pyran-2-y l)oxy)pentanamido)-N-(6-(4-(hydroxymethyl)-4-(methoxymethyl )piperidin-1-yl)-6-oxohexyl)hexanamide-phosphorothioate-6-( 5-(((2R,3R,4R,5R,6R)-3-acetamido-4,5-dihydroxy-6-(hydroxyme thyl)tetrahydro-2H-pyran-2-yl)oxy)pentanamido)-N-(6-(4-(hyd roxymethyl)-4-(methoxymethyl)piperidin-1-yl)-6-oxohexyl)hex anamide
tccaaagacgaagtcgtggat

SEQ ID NO: 2299 - RNA, 21 nt, synthetic construct
  source 1..21: mol_type = other RNA
  modified_base 1: mod_base = OTHER; note = 2'O-methyl guanosine phosphorothioate
  modified_base 2: mod_base = OTHER; note = 2'O-methyl uridine phosphorothioate
  modified_base 3: mod_base = OTHER; note = 2'O-methyl cytidine
  modified_base 4: mod_base = OTHER; note = 2'O-methyl guanosine
  modified_base 5: mod_base = OTHER; note = 2'O-methyl uridine
  modified_base 6: mod_base = OTHER; note = 2'O-methyl guanosine
  modified_base 7: mod_base = OTHER; note = 2'-fluoro guanosine
  modified_base 8: mod_base = OTHER; note = 2'O-methyl adenosine
  modified_base 9: mod_base = OTHER; note = 2'-fluoro uridine
  modified_base 10: mod_base = OTHER; note = 2'-fluoro guanosine
  modified_base 11: mod_base = OTHER; note = 2'-fluoro cytidine
  modified_base 12: mod_base = OTHER; note = 2'O-methyl cytidine
  modified_base 13: mod_base = OTHER; note = 2'O-methyl uridine
  modified_base 14: mod_base = OTHER; note = 2'O-methyl uridine
  modified_base 15: mod_base = OTHER; note = 2'O-methyl guanosine
  modified_base 16: mod_base = OTHER; note = 2'O-methyl guanosine
  modified_base 17: mod_base = OTHER; note = 2'O-methyl uridine
  modified_base 18: mod_base = OTHER; note = 2'O-methyl adenosine
  modified_base 19: mod_base = OTHER; note = 2'O-methyl uridine
  modified_base 20: mod_base = OTHER; note = 2'O-methyl guanosine
  modified_base 21: mod_base = OTHER; note = 2'O-methyl uridine 6-(5-(((2R,3R,4R,5R,6R)-3-acetamido-4,5-dihydroxy-6-(hydrox ymethyl)tetrahydro-2H-pyran-2-yl)oxy)pentanamido)-N-(6-(4-( hydroxymethyl)-4-(methoxymethyl)piperidin-1-yl)-6-oxohexyl) hexanamide-phosphorothioate-6-(5-(((2R,3R,4R,5R,6R)-3-aceta mido-4,5-dihydroxy-6-(hydroxymethyl)tetrahydro-2H-pyran-2-y l)oxy)pentanamido)-N-(6-(4-(hydroxymethyl)-4-(methoxymethyl )piperidin-1-yl)-6-oxohexyl)hexanamide-phosphorothioate-6-( 5-(((2R,3R,4R,5R,6R)-3-acetamido-4,5-dihydroxy-6-(hydroxyme thyl)tetrahydro-2H-pyran-2-yl)oxy)pentanamido)-N-(6-(4-(hyd roxymethyl)-4-(methoxymethyl)piperidin-1-yl)-6-oxohexyl)hex anamide
gtcgtggatgccttggtatgt

SEQ ID NO: 2300 - RNA, 21 nt, synthetic construct
  source 1..21: mol_type = other RNA
  modified_base 1: mod_base = OTHER; note = 2'O-methyl adenosine phosphorothioate
  modified_base 2: mod_base = OTHER; note = 2'O-methyl uridine phosphorothioate
  modified_base 3: mod_base = OTHER; note = 2'O-methyl guanosine
  modified_base 4: mod_base = OTHER; note = 2'O-methyl cytidine
  modified_base 5: mod_base = OTHER; note = 2'O-methyl cytidine
  modified_base 6: mod_base = OTHER; note = 2'O-methyl adenosine
  modified_base 7: mod_base = OTHER; note = 2'-fluoro adenosine
  modified_base 8: mod_base = OTHER; note = 2'O-methyl adenosine
  modified_base 9: mod_base = OTHER; note = 2'-fluoro adenosine
  modified_base 10: mod_base = OTHER; note = 2'-fluoro cytidine
  modified_base 11: mod_base = OTHER; note = 2'-fluoro adenosine
  modified_base 12: mod_base = OTHER; note = 2'O-methyl adenosine
  modified_base 13: mod_base = OTHER; note = 2'O-methyl cytidine
  modified_base 14: mod_base = OTHER; note = 2'O-methyl cytidine
  modified_base 15: mod_base = OTHER; note = 2'O-methyl adenosine
  modified_base 16: mod_base = OTHER; note = 2'O-methyl uridine
  modified_base 17: mod_base = OTHER; note = 2'O-methyl cytidine
  modified_base 18: mod_base = OTHER; note = 2'O-methyl adenosine
  modified_base 19: mod_base = OTHER; note = 2'O-methyl cytidine
  modified_base 20: mod_base = OTHER; note = 2'O-methyl cytidine
  modified_base 21: mod_base = OTHER; note = 2'O-methyl guanosine 6-(5-(((2R,3R,4R,5R,6R)-3-acetamido-4,5-dihydroxy-6-(hydrox ymethyl)tetrahydro-2H-pyran-2-yl)oxy)pentanamido)-N-(6-(4-( hydroxymethyl)-4-(methoxymethyl)piperidin-1-yl)-6-oxohexyl) hexanamide-phosphorothioate-6-(5-(((2R,3R,4R,5R,6R)-3-aceta mido-4,5-dihydroxy-6-(hydroxymethyl)tetrahydro-2H-pyran-2-y l)oxy)pentanamido)-N-(6-(4-(hydroxymethyl)-4-(methoxymethyl )piperidin-1-yl)-6-oxohexyl)hexanamide-phosphorothioate-6-( 5-(((2R,3R,4R,5R,6R)-3-acetamido-4,5-dihydroxy-6-(hydroxyme thyl)tetrahydro-2H-pyran-2-yl)oxy)pentanamido)-N-(6-(4-(hyd roxymethyl)-4-(methoxymethyl)piperidin-1-yl)-6-oxohexyl)hex anamide
atgccaaaacaaccatcaccg

SEQ ID NO: 2301 - RNA, 21 nt, synthetic construct
  source 1..21: mol_type = other RNA
  modified_base 1: mod_base = OTHER; note = 2'O-methyl guanosine phosphorothioate
  modified_base 2: mod_base = OTHER; note = 2'O-methyl adenosine phosphorothioate
  modified_base 3: mod_base = OTHER; note = 2'O-methyl adenosine
  modified_base 4: mod_base = OTHER; note = 2'O-methyl guanosine
  modified_base 5: mod_base = OTHER; note = 2'O-methyl uridine
  modified_base 6: mod_base = OTHER; note = 2'O-methyl cytidine
  modified_base 7: mod_base = OTHER; note = 2'-fluoro guanosine
  modified_base 8: mod_base = OTHER; note = 2'O-methyl uridine
  modified_base 9: mod_base = OTHER; note = 2'-fluoro guanosine
  modified_base 10: mod_base = OTHER; note = 2'-fluoro guanosine
  modified_base 11: mod_base = OTHER; note = 2'-fluoro adenosine
  modified_base 12: mod_base = OTHER; note = 2'O-methyl uridine
  modified_base 13: mod_base = OTHER; note = 2'O-methyl guanosine
  modified_base 14: mod_base = OTHER; note = 2'O-methyl cytidine
  modified_base 15: mod_base = OTHER; note = 2'O-methyl cytidine
  modified_base 16: mod_base = OTHER; note = 2'O-methyl uridine
  modified_base 17: mod_base = OTHER; note = 2'O-methyl uridine
  modified_base 18: mod_base = OTHER; note = 2'O-methyl guanosine
  modified_base 19: mod_base = OTHER; note = 2'O-methyl guanosine
  modified_base 20: mod_base = OTHER; note = 2'O-methyl uridine
  modified_base 21: mod_base = OTHER; note = 2'O-methyl adenosine 6-(5-(((2R,3R,4R,5R,6R)-3-acetamido-4,5-dihydroxy-6-(hydrox ymethyl)tetrahydro-2H-pyran-2-yl)oxy)pentanamido)-N-(6-(4-( hydroxymethyl)-4-(methoxymethyl)piperidin-1-yl)-6-oxohexyl) hexanamide-phosphorothioate-6-(5-(((2R,3R,4R,5R,6R)-3-aceta mido-4,5-dihydroxy-6-(hydroxymethyl)tetrahydro-2H-pyran-2-y l)oxy)pentanamido)-N-(6-(4-(hydroxymethyl)-4-(methoxymethyl )piperidin-1-yl)-6-oxohexyl)hexanamide-phosphorothioate-6-( 5-(((2R,3R,4R,5R,6R)-3-acetamido-4,5-dihydroxy-6-(hydroxyme thyl)tetrahydro-2H-pyran-2-yl)oxy)pentanamido)-N-(6-(4-(hyd roxymethyl)-4-(methoxymethyl)piperidin-1-yl)-6-oxohexyl)hex anamide
gaagtcgtggatgccttggta

SEQ ID NO: 2302 - RNA, 23 nt, synthetic construct
  source 1..23: mol_type = other RNA
  modified_base 1: mod_base = OTHER; note = 2'O-methyl adenosine phosphorothioate
  modified_base 2: mod_base = OTHER; note = 2'-fluoro uridine phosphorothioate
  modified_base 3: mod_base = OTHER; note = 2'O-methyl cytidine
  modified_base 4: mod_base = OTHER; note = 2'O-methyl cytidine
  modified_base 5: mod_base = OTHER; note = 2'O-methyl adenosine
  modified_base 6: mod_base = OTHER; note = 2'-fluoro cytidine
  modified_base 7: mod_base = OTHER; note = 2'O-methyl guanosine
  modified_base 8: mod_base = OTHER; note = 2'O-methyl adenosine
  modified_base 9: mod_base = OTHER; note = 2'O-methyl cytidine
  modified_base 10: mod_base = OTHER; note = 2'O-methyl uridine
  modified_base 11: mod_base = OTHER; note = 2'O-methyl uridine
  modified_base 12: mod_base = OTHER; note = 2'O-methyl cytidine
  modified_base 13: mod_base = OTHER; note = 2'O-methyl guanosine
  modified_base 14: mod_base = OTHER; note = 2'-fluoro uridine
  modified_base 15: mod_base = OTHER; note = 2'O-methyl cytidine
  modified_base 16: mod_base = OTHER; note = 2'-fluoro uridine
  modified_base 17: mod_base = OTHER; note = 2'O-methyl uridine
  modified_base 18: mod_base = OTHER; note = 2'O-methyl uridine
  modified_base 19: mod_base = OTHER; note = 2'O-methyl guanosine
  modified_base 20: mod_base = OTHER; note = 2'O-methyl guanosine
  modified_base 21: mod_base = OTHER; note = 2'O-methyl adenosine phosphorothioate
  modified_base 22: mod_base = OTHER; note = 2'O-methyl uridine phosphorothioate
  modified_base 23: mod_base = OTHER; note = 2'O-methyl uridine
atccacgacttcgtctttggatt

SEQ ID NO: 2303 - RNA, 23 nt, synthetic construct
  source 1..23: mol_type = other RNA
  modified_base 1: mod_base = OTHER; note = 5' vinyl phosphonate 2'O-methyl adenosine phosphorothioate
  modified_base 2: mod_base = OTHER; note = 2'-fluoro guanosine phosphorothioate
  modified_base 3: mod_base = OTHER; note = 2'O-methyl guanosine
  modified_base 4: mod_base = OTHER; note = 2'O-methyl uridine
  modified_base 5: mod_base = OTHER; note = 2'O-methyl guanosine
  modified_base 6: mod_base = OTHER; note = 2'-fluoro adenosine
  modified_base 7: mod_base = OTHER; note = 2'O-methyl uridine
  modified_base 8: mod_base = OTHER; note = 2'O-methyl guanosine
  modified_base 9: mod_base = OTHER; note = 2'O-methyl guanosine
  modified_base 10: mod_base = OTHER; note = 2'O-methyl uridine
  modified_base 11: mod_base = OTHER; note = 2'O-methyl uridine
  modified_base 12: mod_base = OTHER; note = 2'O-methyl guanosine
  modified_base 13: mod_base = OTHER; note = 2'O-methyl uridine
  modified_base 14: mod_base = OTHER; note = 2'-fluoro uridine
  modified_base 15: mod_base = OTHER; note = 2'O-methyl uridine
  modified_base 16: mod_base = OTHER; note = 2'-fluoro uridine
  modified_base 17: mod_base = OTHER; note = 2'O-methyl guanosine
  modified_base 18: mod_base = OTHER; note = 2'O-methyl guanosine
  modified_base 19: mod_base = OTHER; note = 2'O-methyl cytidine
  modified_base 20: mod_base = OTHER; note = 2'O-methyl adenosine
  modified_base 21: mod_base = OTHER; note = 2'O-methyl uridine phosphorothioate
  modified_base 22: mod_base = OTHER; note = 2'O-methyl cytidine phosphorothioate
  modified_base 23: mod_base = OTHER; note = 2'O-methyl adenosine
aggtgatggttgttttggcatca

SEQ ID NO: 2304 - RNA, 23 nt, synthetic construct
  source 1..23: mol_type = other RNA
  modified_base 1: mod_base = OTHER; note = 5' vinyl phosphonate 2'O-methyl adenosine phosphorothioate
  modified_base 2: mod_base = OTHER; note = 2'-fluoro guanosine phosphorothioate
  modified_base 3: mod_base = OTHER; note = 2'O-methyl guanosine
  modified_base 4: mod_base = OTHER; note = 2'O-methyl uridine
  modified_base 5: mod_base = OTHER; note = 2'O-methyl guanosine
  modified_base 6: mod_base = OTHER; note = 2'-fluoro adenosine
  modified_base 7: mod_base = OTHER; note = 2'O-methyl uridine
  modified_base 8: mod_base = OTHER; note = 2'O-methyl guanosine
  modified_base 9: mod_base = OTHER; note = 2'O-methyl guanosine
  modified_base 10: mod_base = OTHER; note = 2'O-methyl uridine
  modified_base 11: mod_base = OTHER; note = 2'O-methyl uridine
  modified_base 12: mod_base = OTHER; note = 2'O-methyl guanosine
  modified_base 13: mod_base = OTHER; note = 2'O-methyl uridine
  modified_base 14: mod_base = OTHER; note = 2'-fluoro uridine
  modified_base 15: mod_base = OTHER; note = 2'O-methyl uridine
  modified_base 16: mod_base = OTHER; note = 2'-fluoro uridine
  modified_base 17: mod_base = OTHER; note = 2'O-methyl guanosine
  modified_base 18: mod_base = OTHER; note = 2'O-methyl guanosine
  modified_base 19: mod_base = OTHER; note = 2'O-methyl cytidine
  modified_base 20: mod_base = OTHER; note = 2'O-methyl adenosine
  modified_base 21: mod_base = OTHER; note = 2'O-methyl uridine phosphorothioate
  modified_base 22: mod_base = OTHER; note = 2'O-methyl cytidine phosphorothioate
  modified_base 23: mod_base = OTHER; note = 2'O-methyl adenosine
aggtgatggttgttttggcatca

SEQ ID NO: 2305 - RNA, 23 nt, synthetic construct
  source 1..23: mol_type = other RNA
  modified_base 1: mod_base = OTHER; note = 5' vinyl phosphonate 2'O-methyl adenosine phosphorothioate
  modified_base 2: mod_base = OTHER; note = 2'-fluoro guanosine phosphorothioate
  modified_base 3: mod_base = OTHER; note = 2'O-methyl guanosine
  modified_base 4: mod_base = OTHER; note = 2'O-methyl uridine
  modified_base 5: mod_base = OTHER; note = 2'O-methyl guanosine
  modified_base 6: mod_base = OTHER; note = 2'-fluoro adenosine
  modified_base 7: mod_base = OTHER; note = 2'O-methyl uridine
  modified_base 8: mod_base = OTHER; note = 2'O-methyl guanosine
  modified_base 9: mod_base = OTHER; note = 2'O-methyl guanosine
  modified_base 10: mod_base = OTHER; note = 2'O-methyl uridine
  modified_base 11: mod_base = OTHER; note = 2'O-methyl uridine
  modified_base 12: mod_base = OTHER; note = 2'O-methyl guanosine
  modified_base 13: mod_base = OTHER; note = 2'O-methyl uridine
  modified_base 14: mod_base = OTHER; note = 2'-fluoro uridine
  modified_base 15: mod_base = OTHER; note = 2'O-methyl uridine
  modified_base 16: mod_base = OTHER; note = 2'-fluoro uridine
  modified_base 17: mod_base = OTHER; note = 2'O-methyl guanosine
  modified_base 18: mod_base = OTHER; note = 2'O-methyl guanosine
  modified_base 19: mod_base = OTHER; note = 2'O-methyl cytidine
  modified_base 20: mod_base = OTHER; note = 2'O-methyl adenosine
  modified_base 21: mod_base = OTHER; note = 2'O-methyl uridine phosphorothioate
  modified_base 22: mod_base = OTHER; note = 2'O-methyl cytidine phosphorothioate
  modified_base 23: mod_base = OTHER; note = 2'O-methyl adenosine
aggtgatggttgttttggcatca

SEQ ID NO: 2306 - RNA, 23 nt, synthetic construct
  source 1..23: mol_type = other RNA
  modified_base 1: mod_base = OTHER; note = 5' vinyl phosphonate 2'O-methyl adenosine phosphorothioate
  modified_base 2: mod_base = OTHER; note = 2'-fluoro guanosine phosphorothioate
  modified_base 3: mod_base = OTHER; note = 2'O-methyl guanosine
  modified_base 4: mod_base = OTHER; note = 2'O-methyl uridine
  modified_base 5: mod_base = OTHER; note = 2'O-methyl guanosine
  modified_base 6: mod_base = OTHER; note = 2'-fluoro adenosine
  modified_base 7: mod_base = OTHER; note = 2'O-methyl uridine
  modified_base 8: mod_base = OTHER; note = 2'O-methyl guanosine
  modified_base 9: mod_base = OTHER; note = 2'O-methyl guanosine
  modified_base 10: mod_base = OTHER; note = 2'O-methyl uridine
  modified_base 11: mod_base = OTHER; note = 2'O-methyl uridine
  modified_base 12: mod_base = OTHER; note = 2'O-methyl guanosine
  modified_base 13: mod_base = OTHER; note = 2'O-methyl uridine
  modified_base 14: mod_base = OTHER; note = 2'-fluoro uridine
  modified_base 15: mod_base = OTHER; note = 2'O-methyl uridine
  modified_base 16: mod_base = OTHER; note = 2'-fluoro uridine
  modified_base 17: mod_base = OTHER; note = 2'O-methyl guanosine
  modified_base 18: mod_base = OTHER; note = 2'O-methyl guanosine
  modified_base 19: mod_base = OTHER; note = 2'O-methyl cytidine
  modified_base 20: mod_base = OTHER; note = 2'O-methyl adenosine
  modified_base 21: mod_base = OTHER; note = 2'O-methyl uridine phosphorothioate
  modified_base 22: mod_base = OTHER; note = 2'O-methyl cytidine phosphorothioate
  modified_base 23: mod_base = OTHER; note = 2'O-methyl adenosine
aggtgatggttgttttggcatca

SEQ ID NO: 2307 - RNA, 23 nt, synthetic construct
  source 1..23: mol_type = other RNA
  modified_base 1: mod_base = OTHER; note = Threo-nucleic acid (TNA) phosphonate uridine
  modified_base 2: mod_base = OTHER; note = 2'-fluoro adenosine phosphorothioate
  modified_base 3: mod_base = OTHER; note = 2'O-methyl cytidine
  modified_base 4: mod_base = OTHER; note = 2'O-methyl cytidine
  modified_base 5: mod_base = OTHER; note = 2'O-methyl adenosine
  modified_base 6: mod_base = OTHER; note = 2'-fluoro adenosine
  modified_base 7: mod_base = OTHER; note = 2'O-methyl guanosine
  modified_base 8: mod_base = OTHER; note = 2'O-methyl guanosine
  modified_base 9: mod_base = OTHER; note = 2'O-methyl cytidine
  modified_base 10: mod_base = OTHER; note = 2'O-methyl adenosine
  modified_base 11: mod_base = OTHER; note = 2'O-methyl uridine
  modified_base 12: mod_base = OTHER; note = 2'O-methyl cytidine
  modified_base 13: mod_base = OTHER; note = 2'O-methyl cytidine
  modified_base 14: mod_base = OTHER; note = 2'-fluoro adenosine
  modified_base 15: mod_base = OTHER; note = 2'O-methyl cytidine
  modified_base 16: mod_base = OTHER; note = 2'-fluoro guanosine
  modified_base 17: mod_base = OTHER; note = 2'O-methyl adenosine
  modified_base 18: mod_base = OTHER; note = 2'O-methyl cytidine
  modified_base 19: mod_base = OTHER; note = 2'O-methyl uridine
  modified_base 20: mod_base = OTHER; note = 2'O-methyl uridine
  modified_base 21: mod_base = OTHER; note = 2'O-methyl cytidine phosphorothioate
  modified_base 22: mod_base = OTHER; note = 2'O-methyl guanosine phosphorothioate
  modified_base 23: mod_base = OTHER; note = 2'O-methyl uridine
taccaaggcatccacgacttcgt

SEQ ID NO: 2308 - RNA, 23 nt, synthetic construct
  source 1..23: mol_type = other RNA
  modified_base 1: mod_base = OTHER; note = 5' vinyl phosphonate 2'O-methyl adenosine phosphorothioate
  modified_base 2: mod_base = OTHER; note = 2'-fluoro adenosine phosphorothioate
  modified_base 3: mod_base = OTHER; note = 2'O-methyl cytidine
  modified_base 4: mod_base = OTHER; note = 2'O-methyl cytidine
  modified_base 5: mod_base = OTHER; note = 2'O-methyl adenosine
  modified_base 6: mod_base = OTHER; note = 2'-fluoro adenosine
  modified_base 7: mod_base = OTHER; note = 2',3'-seco guanosine
  modified_base 8: mod_base = OTHER; note = 2'O-methyl guanosine
  modified_base 9: mod_base = OTHER; note = 2'O-methyl cytidine
  modified_base 10: mod_base = OTHER; note = 2'O-methyl adenosine
  modified_base 11: mod_base = OTHER; note = 2'O-methyl uridine
  modified_base 12: mod_base = OTHER; note = 2'O-methyl cytidine
  modified_base 13: mod_base = OTHER; note = 2'O-methyl cytidine
  modified_base 14: mod_base = OTHER; note = 2'-fluoro adenosine
  modified_base 15: mod_base = OTHER; note = 2'O-methyl cytidine
  modified_base 16: mod_base = OTHER; note = 2'-fluoro guanosine
  modified_base 17: mod_base = OTHER; note = 2'O-methyl adenosine
  modified_base 18: mod_base = OTHER; note = 2'O-methyl cytidine
  modified_base 19: mod_base = OTHER; note = 2'O-methyl uridine
  modified_base 20: mod_base = OTHER; note = 2'O-methyl uridine
  modified_base 21: mod_base = OTHER; note = 2'O-methyl cytidine phosphorothioate
  modified_base 22: mod_base = OTHER; note = 2'O-methyl guanosine phosphorothioate
  modified_base 23: mod_base = OTHER; note = 2'O-methyl uridine
aaccaaggcatccacgacttcgt

SEQ ID NO: 2309 - RNA, 23 nt, synthetic construct
  source 1..23: mol_type = other RNA
  modified_base 1: mod_base = OTHER; note = 5' vinyl phosphonate 2'O-methyl adenosine phosphorothioate
  modified_base 2: mod_base = OTHER; note = 2'-fluoro adenosine phosphorothioate
  modified_base 3: mod_base = OTHER; note = 2'O-methyl cytidine
  modified_base 4: mod_base = OTHER; note = 2'O-methyl cytidine
  modified_base 5: mod_base = OTHER; note = 2'O-methyl adenosine
  modified_base 6: mod_base = OTHER; note = 2'-fluoro adenosine
  modified_base 7: mod_base = OTHER; note = 2'O-methyl guanosine
  modified_base 8: mod_base = OTHER; note = 2'O-methyl guanosine
  modified_base 9: mod_base = OTHER; note = 2'O-methyl cytidine
  modified_base 10: mod_base = OTHER; note = 2'O-methyl adenosine
  modified_base 11: mod_base = OTHER; note = 2'O-methyl uridine
  modified_base 12: mod_base = OTHER; note = 2'O-methyl cytidine
  modified_base 13: mod_base = OTHER; note = 2'O-methyl cytidine
  modified_base 14: mod_base = OTHER; note = 2'-fluoro adenosine
  modified_base 15: mod_base = OTHER; note = 2'O-methyl cytidine
  modified_base 16: mod_base = OTHER; note = 2'-fluoro guanosine
  modified_base 17: mod_base = OTHER; note = 2'O-methyl adenosine
  modified_base 18: mod_base = OTHER; note = 2'O-methyl cytidine
  modified_base 19: mod_base = OTHER; note = 2'O-methyl uridine
  modified_base 20: mod_base = OTHER; note = 2'O-methyl uridine
  modified_base 21: mod_base = OTHER; note = 2'O-methyl cytidine phosphorothioate
  modified_base 22: mod_base = OTHER; note = 2'O-methyl guanosine phosphorothioate
  modified_base 23: mod_base = OTHER; note = 2'O-methyl uridine
aaccaaggcatccacgacttcgt

SEQ ID NO: 2310 - RNA, 23 nt, synthetic construct
  source 1..23: mol_type = other RNA
  modified_base 1: mod_base = OTHER; note = 5' vinyl phosphonate 2'O-methyl adenosine phosphorothioate
  modified_base 2: mod_base = OTHER; note = 2'-fluoro adenosine phosphorothioate
  modified_base 3: mod_base = OTHER; note = 2'O-methyl cytidine
  modified_base 4: mod_base = OTHER; note = 2'O-methyl cytidine
  modified_base 5: mod_base = OTHER; note = 2'O-methyl adenosine
  modified_base 6: mod_base = OTHER; note = 2'-fluoro adenosine
  modified_base 7: mod_base = OTHER; note = 2'O-methyl guanosine
  modified_base 8: mod_base = OTHER; note = 2'O-methyl guanosine
  modified_base 9: mod_base = OTHER; note = 2'O-methyl cytidine
  modified_base 10: mod_base = OTHER; note = 2'O-methyl adenosine
  modified_base 11: mod_base = OTHER; note = 2'O-methyl uridine
  modified_base 12: mod_base = OTHER; note = 2'O-methyl cytidine
  modified_base 13: mod_base = OTHER; note = 2'O-methyl cytidine
  modified_base 14: mod_base = OTHER; note = 2'-fluoro adenosine
  modified_base 15: mod_base = OTHER; note = 2'O-methyl cytidine
  modified_base 16: mod_base = OTHER; note = 2'-fluoro guanosine
  modified_base 17: mod_base = OTHER; note = 2'O-methyl adenosine
  modified_base 18: mod_base = OTHER; note = 2'O-methyl cytidine
  modified_base 19: mod_base = OTHER; note = 2'O-methyl uridine
  modified_base 20: mod_base = OTHER; note = 2'O-methyl uridine
  modified_base 21: mod_base = OTHER; note = 2'O-methyl cytidine phosphorothioate
  modified_base 22: mod_base = OTHER; note = 2'O-methyl guanosine phosphorothioate
  modified_base 23: mod_base = OTHER; note = 2'O-methyl uridine
aaccaaggcatccacgacttcgt

SEQ ID NO: 2311 - RNA, 23 nt, synthetic construct
  source 1..23: mol_type = other RNA
  modified_base 1: mod_base = OTHER; note = 5' vinyl phosphonate 2'O-methyl adenosine phosphorothioate
  modified_base 2: mod_base = OTHER; note = 2'-fluoro adenosine phosphorothioate
  modified_base 3: mod_base = OTHER; note = 2'O-methyl cytidine
  modified_base 4: mod_base = OTHER; note = 2'O-methyl cytidine
  modified_base 5: mod_base = OTHER; note = 2'O-methyl adenosine
  modified_base 6: mod_base = OTHER; note = 2'-fluoro adenosine
  modified_base 7: mod_base = OTHER; note = 2'O-methyl guanosine
  modified_base 8: mod_base = OTHER; note = 2'O-methyl guanosine
  modified_base 9: mod_base = OTHER; note = 2'O-methyl cytidine
  modified_base 10: mod_base = OTHER; note = 2'O-methyl adenosine
  modified_base 11: mod_base = OTHER; note = 2'O-methyl uridine
  modified_base 12: mod_base = OTHER; note = 2'O-methyl cytidine
  modified_base 13: mod_base = OTHER; note = 2'O-methyl cytidine
  modified_base 14: mod_base = OTHER; note = 2'-fluoro adenosine
  modified_base 15: mod_base = OTHER; note = 2'O-methyl cytidine
  modified_base 16: mod_base = OTHER; note = 2'-fluoro guanosine
  modified_base 17: mod_base = OTHER; note = 2'O-methyl adenosine
  modified_base 18: mod_base = OTHER; note = 2'O-methyl cytidine
  modified_base 19: mod_base = OTHER; note = 2'O-methyl uridine
  modified_base 20: mod_base = OTHER; note = 2'O-methyl uridine
  modified_base 21: mod_base = OTHER; note = 2'O-methyl cytidine phosphorothioate
  modified_base 22: mod_base = OTHER; note = 2'O-methyl guanosine phosphorothioate
  modified_base 23: mod_base = OTHER; note = 2'O-methyl uridine
aaccaaggcatccacgacttcgt

SEQ ID NO: 2312 - RNA, 23 nt, synthetic construct
  source 1..23: mol_type = other RNA
  modified_base 1: mod_base = OTHER; note = 2'O-methyl adenosine phosphorothioate
  modified_base 2: mod_base = OTHER; note = 2'-fluoro adenosine phosphorothioate
  modified_base 3: mod_base = OTHER; note = 2'O-methyl cytidine
  modified_base 4: mod_base = OTHER; note = 2'O-methyl cytidine
  modified_base 5: mod_base = OTHER; note = 2'O-methyl adenosine
  modified_base 6: mod_base = OTHER; note = 2'-fluoro adenosine
  modified_base 7: mod_base = OTHER; note = 2'O-methyl guanosine
  modified_base 8: mod_base = OTHER; note = 2'O-methyl guanosine
  modified_base 9: mod_base = OTHER; note = 2'O-methyl cytidine
  modified_base 10: mod_base = OTHER; note = 2'O-methyl adenosine
  modified_base 11: mod_base = OTHER; note = 2'O-methyl uridine
  modified_base 12: mod_base = OTHER; note = 2'O-methyl cytidine
  modified_base 13: mod_base = OTHER; note = 2'O-methyl cytidine
  modified_base 14: mod_base = OTHER; note = 2'-fluoro adenosine
  modified_base 15: mod_base = OTHER; note = 2'O-methyl cytidine
  modified_base 16: mod_base = OTHER; note = 2'-fluoro guanosine
  modified_base 17: mod_base = OTHER; note = 2'O-methyl adenosine
  modified_base 18: mod_base = OTHER; note = 2'O-methyl cytidine
  modified_base 19: mod_base = OTHER; note = 2'O-methyl uridine
  modified_base 20: mod_base = OTHER; note = 2'O-methyl uridine
  modified_base 21: mod_base = OTHER; note = 2'O-methyl cytidine phosphorothioate
  modified_base 22: mod_base = OTHER; note = 2'O-methyl guanosine phosphorothioate
  modified_base 23: mod_base = OTHER; note = 2'O-methyl uridine
aaccaaggcatccacgacttcgt

SEQ ID NO: 2313 - RNA, 23 nt, synthetic construct
  source 1..23: mol_type = other RNA
  modified_base 1: mod_base = OTHER; note = 2'O-methyl adenosine phosphorothioate
  modified_base 2: mod_base = OTHER; note = 2'-fluoro adenosine phosphorothioate
  modified_base 3: mod_base = OTHER; note = 2'O-methyl cytidine
  modified_base 4: mod_base = OTHER; note = 2'O-methyl cytidine
  modified_base 5: mod_base = OTHER; note = 2'O-methyl adenosine
  modified_base 6: mod_base = OTHER; note = 2'-fluoro adenosine
  modified_base 7: mod_base = OTHER; note = 2'O-methyl guanosine
  modified_base 8: mod_base = OTHER; note = 2'O-methyl guanosine
  modified_base 9: mod_base = OTHER; note = 2'O-methyl cytidine
  modified_base 10: mod_base = OTHER; note = 2'O-methyl adenosine
  modified_base 11: mod_base = OTHER; note = 2'O-methyl uridine
  modified_base 12: mod_base = OTHER; note = 2'O-methyl cytidine
  modified_base 13: mod_base = OTHER; note = 2'O-methyl cytidine
  modified_base 14: mod_base = OTHER; note = 2'-fluoro adenosine
  modified_base 15: mod_base = OTHER; note = 2'O-methyl cytidine
  modified_base 16: mod_base = OTHER; note = 2'-fluoro guanosine
  modified_base 17: mod_base = OTHER; note = 2'O-methyl adenosine
  modified_base 18: mod_base = OTHER; note = 2'O-methyl cytidine
  modified_base 19: mod_base = OTHER; note = 2'O-methyl uridine
  modified_base 20: mod_base = OTHER; note = 2'O-methyl uridine
  modified_base 21: mod_base = OTHER; note = 2'O-methyl cytidine phosphorothioate
  modified_base 22: mod_base = OTHER; note = 2'O-methyl guanosine phosphorothioate
  modified_base 23: mod_base = OTHER; note = 2'O-methyl uridine
aaccaaggcatccacgacttcgt

SEQ ID NO: 2314 - RNA, 23 nt, synthetic construct
  source 1..23: mol_type = other RNA
  modified_base 1: mod_base = OTHER; note = 2'O-methyl adenosine phosphorothioate
  modified_base 2: mod_base = OTHER; note = 2'-fluoro adenosine phosphorothioate
  modified_base 3: mod_base = OTHER; note = 2'O-methyl cytidine
  modified_base 4: mod_base = OTHER; note = 2'O-methyl cytidine
  modified_base 5: mod_base = OTHER; note = 2'O-methyl adenosine
  modified_base 6: mod_base = OTHER; note = 2'-fluoro adenosine
  modified_base 7: mod_base = OTHER; note = 2'O-methyl guanosine
  modified_base 8: mod_base = OTHER; note = 2'O-methyl guanosine
  modified_base 9: mod_base = OTHER; note = 2'O-methyl cytidine
  modified_base 10: mod_base = OTHER; note = 2'O-methyl adenosine
  modified_base 11: mod_base = OTHER; note = 2'O-methyl uridine
  modified_base 12: mod_base = OTHER; note = 2'O-methyl cytidine
  modified_base 13: mod_base = OTHER; note = 2'O-methyl cytidine
  modified_base 14: mod_base = OTHER; note = 2'-fluoro adenosine
  modified_base 15: mod_base = OTHER; note = 2'O-methyl cytidine
  modified_base 16: mod_base = OTHER; note = 2'-fluoro guanosine
  modified_base 17: mod_base = OTHER; note = 2'O-methyl adenosine
  modified_base 18: mod_base = OTHER; note = 2'O-methyl cytidine
  modified_base 19: mod_base = OTHER; note = 2'O-methyl uridine
  modified_base 20: mod_base = OTHER; note = 2'O-methyl uridine
  modified_base 21: mod_base = OTHER; note = 2'O-methyl cytidine phosphorothioate
  modified_base 22: mod_base = OTHER; note = 2'O-methyl guanosine phosphorothioate
  modified_base 23: mod_base = OTHER; note = 2'O-methyl uridine
aaccaaggcatccacgacttcgt

SEQ ID NO: 2315 - RNA, 23 nt, synthetic construct
  source 1..23: mol_type = other RNA
  modified_base 1: mod_base = OTHER; note = 5' vinyl phosphonate 2'O-methyl adenosine phosphorothioate
  modified_base 2: mod_base = OTHER; note = 2'-fluoro cytidine phosphorothioate
  modified_base 3: mod_base = OTHER; note = 2'O-methyl adenosine
  modified_base 4: mod_base = OTHER; note = 2'O-methyl uridine
  modified_base 5: mod_base = OTHER; note = 2'O-methyl adenosine
  modified_base 6: mod_base = OTHER; note = 2'-fluoro cytidine
  modified_base 7: mod_base = OTHER; note = 2'O-methyl cytidine
  modified_base 8: mod_base = OTHER; note = 2'O-methyl adenosine
  modified_base 9: mod_base = OTHER; note = 2'O-methyl adenosine
  modified_base 10: mod_base = OTHER; note = 2'O-methyl guanosine
  modified_base 11: mod_base = OTHER; note = 2'O-methyl guanosine
  modified_base 12: mod_base = OTHER; note = 2'O-methyl cytidine
  modified_base 13: mod_base = OTHER; note = 2'O-methyl adenosine
  modified_base 14: mod_base = OTHER; note = 2'-fluoro uridine
  modified_base 15: mod_base = OTHER; note = 2'O-methyl cytidine
  modified_base 16: mod_base = OTHER; note = 2'-fluoro cytidine
  modified_base 17: mod_base = OTHER; note = 2'O-methyl adenosine
  modified_base 18: mod_base = OTHER; note = 2'O-methyl cytidine
  modified_base 19: mod_base = OTHER; note = 2'O-methyl guanosine
  modified_base 20: mod_base = OTHER; note = 2'O-methyl adenosine
  modified_base 21: mod_base = OTHER; note = 2'O-methyl cytidine phosphorothioate
  modified_base 22: mod_base = OTHER; note = 2'O-methyl uridine phosphorothioate
  modified_base 23: mod_base = OTHER; note = 2'O-methyl uridine
acataccaaggcatccacgactt

SEQ ID NO: 2316 - RNA, 23 nt, synthetic construct
  source 1..23: mol_type = other RNA
  modified_base 1: mod_base = OTHER; note = 5' vinyl phosphonate 2'O-methyl adenosine phosphorothioate
  modified_base 2: mod_base = OTHER; note = 2'-fluoro adenosine phosphorothioate
  modified_base 3: mod_base = OTHER; note = 2'O-methyl cytidine
  modified_base 4: mod_base = OTHER; note = 2'O-methyl adenosine
  modified_base 5: mod_base = OTHER; note = 2'O-methyl uridine
  modified_base 6: mod_base = OTHER; note = 2'-fluoro adenosine
  modified_base 7: mod_base = OTHER; note = 2'O-methyl cytidine
  modified_base 8: mod_base = OTHER; note = 2'O-methyl cytidine
  modified_base 9: mod_base = OTHER; note = 2'O-methyl adenosine
  modified_base 10: mod_base = OTHER; note = 2'O-methyl adenosine
  modified_base 11: mod_base = OTHER; note = 2'O-methyl guanosine
  modified_base 12: mod_base = OTHER; note = 2'O-methyl guanosine
  modified_base 13: mod_base = OTHER; note = 2'O-methyl cytidine
  modified_base 14: mod_base = OTHER; note = 2'-fluoro adenosine
  modified_base 15: mod_base = OTHER; note = 2'O-methyl uridine
  modified_base 16: mod_base = OTHER; note = 2'-fluoro cytidine
  modified_base 17: mod_base = OTHER; note = 2'O-methyl cytidine
  modified_base 18: mod_base = OTHER; note = 2'O-methyl adenosine
  modified_base 19: mod_base = OTHER; note = 2'O-methyl cytidine
  modified_base 20: mod_base = OTHER; note = 2'O-methyl guanosine
  modified_base 21: mod_base = OTHER; note = 2'O-methyl adenosine phosphorothioate
  modified_base 22: mod_base = OTHER; note = 2'O-methyl uridine phosphorothioate
  modified_base 23: mod_base = OTHER; note = 2'O-methyl uridine
aacataccaaggcatccacgatt

SEQ ID NO: 2317 - RNA, 21 nt, synthetic construct
  source 1..21: mol_type = other RNA
  modified_base 1: mod_base = OTHER; note = 2'O-methyl uridine phosphorothioate
  modified_base 2: mod_base = OTHER; note = 2'-fluoro uridine phosphorothioate
  modified_base 3: mod_base = OTHER; note = 2'O-methyl guanosine
  modified_base 4: mod_base = OTHER; note = 2'O-methyl uridine
  modified_base 5: mod_base = OTHER; note = 2'O-methyl cytidine
  modified_base 6: mod_base = OTHER; note = 2'-fluoro adenosine
  modified_base 7: mod_base = OTHER; note = 2'O-methyl cytidine
  modified_base 8: mod_base = OTHER; note = 2'O-methyl uridine
  modified_base 9: mod_base = OTHER; note = 2'O-methyl cytidine
  modified_base 10: mod_base = OTHER; note = 2'O-methyl adenosine
  modified_base 11: mod_base = OTHER; note = 2'O-methyl cytidine
  modified_base 12: mod_base = OTHER; note = 2'O-methyl uridine
  modified_base 13: mod_base = OTHER; note = 2'O-methyl cytidine
  modified_base 14: mod_base = OTHER; note = 2'-fluoro cytidine
  modified_base 15: mod_base = OTHER; note = 2'O-methyl uridine
  modified_base 16: mod_base = OTHER; note = 2'-fluoro cytidine
  modified_base 17: mod_base = OTHER; note = 2'O-methyl cytidine
  modified_base 18: mod_base = OTHER; note = 2'O-methyl adenosine
  modified_base 19: mod_base = OTHER; note = 2'O-methyl uridine phosphorothioate
  modified_base 20: mod_base = OTHER; note = 2'O-methyl uridine phosphorothioate
  modified_base 21: mod_base = OTHER; note = 2'O-methyl uridine
ttgtcactcactcctccattt

SEQ ID NO: 2318 - RNA, 23 nt, synthetic construct
  source 1..23: mol_type = other RNA
  modified_base 1: mod_base = OTHER; note = 2'O-methyl cytidine phosphorothioate
  modified_base 2: mod_base = OTHER; note = 2'-fluoro guanosine phosphorothioate
  modified_base 3: mod_base = OTHER; note = 2'O-methyl guanosine
  modified_base 4: mod_base = OTHER; note = 2'O-methyl uridine
  modified_base 5: mod_base = OTHER; note = 2'O-methyl guanosine
  modified_base 6: mod_base = OTHER; note = 2'-fluoro adenosine
  modified_base 7: mod_base = OTHER; note = 2'O-methyl uridine
  modified_base 8: mod_base = OTHER; note = 2'O-methyl guanosine
  modified_base 9: mod_base = OTHER; note = 2'O-methyl guanosine
  modified_base 10: mod_base = OTHER; note = 2'O-methyl uridine
  modified_base 11: mod_base = OTHER; note = 2'O-methyl uridine
  modified_base 12: mod_base = OTHER; note = 2'O-methyl guanosine
  modified_base 13: mod_base = OTHER; note = 2'O-methyl uridine
  modified_base 14: mod_base = OTHER; note = 2'-fluoro uridine
  modified_base 15: mod_base = OTHER; note = 2'O-methyl uridine
  modified_base 16: mod_base = OTHER; note = 2'-fluoro uridine
  modified_base 17: mod_base = OTHER; note = 2'O-methyl guanosine
  modified_base 18: mod_base = OTHER; note = 2'O-methyl guanosine
  modified_base 19: mod_base = OTHER; note = 2'O-methyl cytidine
  modified_base 20: mod_base = OTHER; note = 2'O-methyl adenosine
  modified_base 21: mod_base = OTHER; note = 2'O-methyl uridine phosphorothioate
  modified_base 22: mod_base = OTHER; note = 2'O-methyl uridine phosphorothioate
  modified_base 23: mod_base = OTHER; note = 2'O-methyl uridine
cggtgatggttgttttggcattt

SEQ ID NO: 2319 - RNA, 23 nt, synthetic construct
  source 1..23: mol_type = other RNA
  modified_base 1: mod_base = OTHER; note = 2'O-methyl uridine phosphorothioate
  modified_base 2: mod_base = OTHER; note = 2'-fluoro adenosine phosphorothioate
  modified_base 3: mod_base = OTHER; note = 2'O-methyl cytidine
  modified_base 4: mod_base = OTHER; note = 2'O-methyl cytidine
  modified_base 5: mod_base = OTHER; note = 2'O-methyl adenosine
  modified_base 6: mod_base = OTHER; note = 2'O-methyl adenosine
  modified_base 7: mod_base = OTHER; note = 2'O-methyl guanosine
  modified_base 8: mod_base = OTHER; note = 2'O-methyl guanosine
  modified_base 9: mod_base = OTHER; note = 2'O-methyl cytidine
  modified_base 10: mod_base = OTHER; note = 2'O-methyl adenosine
  modified_base 11: mod_base = OTHER; note = 2'O-methyl uridine
  modified_base 12: mod_base = OTHER; note = 2'O-methyl cytidine
  modified_base 13: mod_base = OTHER; note = 2'O-methyl cytidine
  modified_base 14: mod_base = OTHER; note = 2'-fluoro adenosine
  modified_base 15: mod_base = OTHER; note = 2'O-methyl cytidine
  modified_base 16: mod_base = OTHER; note = 2'O-methyl guanosine
  modified_base 17: mod_base = OTHER; note = 2'O-methyl adenosine
  modified_base 18: mod_base = OTHER; note = 2'O-methyl cytidine
  modified_base 19: mod_base = OTHER; note = 2'O-methyl uridine
  modified_base 20: mod_base = OTHER; note = 2'O-methyl uridine
  modified_base 21: mod_base = OTHER; note = 2'O-methyl cytidine phosphorothioate
  modified_base 22: mod_base = OTHER; note = 2'O-methyl uridine phosphorothioate
  modified_base 23: mod_base = OTHER; note = 2'O-methyl uridine
taccaaggcatccacgacttctt

SEQ ID NO: 2320 - RNA, 23 nt, synthetic construct
  source 1..23: mol_type = other RNA
  modified_base 1: mod_base = OTHER; note = 5' vinyl phosphonate 2'O-methyl uridine phosphorothioate
  modified_base 2: mod_base = OTHER; note = 2'-fluoro adenosine phosphorothioate
  modified_base 3: mod_base = OTHER; note = 2'O-methyl cytidine
  modified_base 4: mod_base = OTHER; note = 2'O-methyl cytidine
  modified_base 5: mod_base = OTHER; note = 2'O-methyl adenosine
  modified_base 6: mod_base = OTHER; note = 2'O-methyl adenosine
  modified_base 7: mod_base = OTHER; note = 2'O-methyl guanosine
  modified_base 8: mod_base = OTHER; note = 2'O-methyl guanosine
  modified_base 9: mod_base = OTHER; note = 2'O-methyl cytidine
  modified_base 10: mod_base = OTHER; note = 2'O-methyl adenosine
  modified_base 11: mod_base = OTHER; note = 2'O-methyl uridine
  modified_base 12: mod_base = OTHER; note = 2'O-methyl cytidine
  modified_base 13: mod_base = OTHER; note = 2'O-methyl cytidine
  modified_base 14: mod_base = OTHER; note = 2'-fluoro adenosine
  modified_base 15: mod_base = OTHER; note = 2'O-methyl cytidine
  modified_base 16: mod_base = OTHER; note = 2'O-methyl guanosine
  modified_base 17: mod_base = OTHER; note = 2'O-methyl adenosine
  modified_base 18: mod_base = OTHER; note = 2'O-methyl cytidine
  modified_base 19: mod_base = OTHER; note = 2'O-methyl uridine
  modified_base 20: mod_base = OTHER; note = 2'O-methyl uridine
  modified_base 21: mod_base = OTHER; note = 2'O-methyl cytidine phosphorothioate
  modified_base 22: mod_base = OTHER; note = 2'O-methyl uridine phosphorothioate
  modified_base 23: mod_base = OTHER; note = 2'O-methyl uridine
taccaaggcatccacgacttctt

SEQ ID NO: 2321 - RNA, 23 nt, synthetic construct
  source 1..23: mol_type = other RNA
  modified_base 1: mod_base = OTHER; note = 2'O-methyl uridine phosphorothioate
  modified_base 2: mod_base = OTHER; note = 2'-fluoro uridine phosphorothioate
  modified_base 3: mod_base = OTHER; note = 2'O-methyl uridine
  modified_base 4: mod_base = OTHER; note = 2'O-methyl guanosine
  modified_base 5: mod_base = OTHER; note = 2'O-methyl guanosine
  modified_base 6: mod_base = OTHER; note = 2'-fluoro adenosine
  modified_base 7: mod_base = OTHER; note = 2'O-methyl cytidine
  modified_base 8: mod_base = OTHER; note = 2'O-methyl cytidine
  modified_base 9: mod_base = OTHER; note = 2'O-methyl guanosine
  modified_base 10: mod_base = OTHER; note = 2'O-methyl adenosine
  modified_base 11: mod_base = OTHER; note = 2'O-methyl adenosine
  modified_base 12: mod_base = OTHER; note = 2'O-methyl adenosine
  modified_base 13: mod_base = OTHER; note = 2'O-methyl guanosine
  modified_base 14: mod_base = OTHER; note = 2'-fluoro uridine
  modified_base 15: mod_base = OTHER; note = 2'O-methyl cytidine
  modified_base 16: mod_base = OTHER; note = 2'-fluoro adenosine
  modified_base 17: mod_base = OTHER; note = 2'O-methyl guanosine
  modified_base 18: mod_base = OTHER; note = 2'O-methyl adenosine
  modified_base 19: mod_base = OTHER; note = 2'O-methyl cytidine
  modified_base 20: mod_base = OTHER; note = 2'O-methyl adenosine
  modified_base 21: mod_base = OTHER; note = 2'O-methyl cytidine phosphorothioate
  modified_base 22: mod_base = OTHER; note = 2'O-methyl uridine phosphorothioate
  modified_base 23: mod_base = OTHER; note = 2'O-methyl uridine
tttggaccgaaagtcagacactt

SEQ ID NO: 2322 - RNA, 23 nt, synthetic construct
  source 1..23: mol_type = other RNA
  modified_base 1: mod_base = OTHER; note = 5' vinyl phosphonate 2'O-methyl adenosine phosphorothioate
  modified_base 2: mod_base = OTHER; note = 2'-fluoro uridine phosphorothioate
  modified_base 3: mod_base = OTHER; note = 2'O-methyl cytidine
  modified_base 4: mod_base = OTHER; note = 2'O-methyl cytidine
  modified_base 5: mod_base = OTHER; note = 2'O-methyl adenosine
  modified_base 6: mod_base = OTHER; note = 2'-fluoro cytidine
  modified_base 7: mod_base = OTHER; note = 2'O-methyl guanosine
  modified_base 8: mod_base = OTHER; note = 2'O-methyl adenosine
  modified_base 9: mod_base = OTHER; note = 2'O-methyl cytidine
  modified_base 10: mod_base = OTHER; note = 2'O-methyl uridine
  modified_base 11: mod_base = OTHER; note = 2'O-methyl uridine
  modified_base 12: mod_base = OTHER; note = 2'O-methyl cytidine
  modified_base 13: mod_base = OTHER; note = 2'O-methyl guanosine
  modified_base 14: mod_base = OTHER; note = 2'-fluoro uridine
  modified_base 15: mod_base = OTHER; note = 2'O-methyl cytidine
  modified_base 16: mod_base = OTHER; note = 2'-fluoro uridine
  modified_base 17: mod_base = OTHER; note = 2'O-methyl uridine
  modified_base 18: mod_base = OTHER; note = 2'O-methyl uridine
  modified_base 19: mod_base = OTHER; note = 2'O-methyl guanosine
  modified_base 20: mod_base = OTHER; note = 2'O-methyl guanosine
  modified_base 21: mod_base = OTHER; note = 2'O-methyl adenosine phosphorothioate
  modified_base 22: mod_base = OTHER; note = 2'O-methyl uridine phosphorothioate
  modified_base 23: mod_base = OTHER; note = 2'O-methyl uridine
atccacgacttcgtctttggatt

SEQ ID NO: 2323 - RNA, 23 nt, synthetic construct
  source 1..23: mol_type = other RNA
  modified_base 1: mod_base = OTHER; note = 2'O-methyl adenosine phosphorothioate
  modified_base 2: mod_base = OTHER; note = 2'-fluoro cytidine phosphorothioate
  modified_base 3: mod_base = OTHER; note = 2'O-methyl adenosine
  modified_base 4: mod_base = OTHER; note = 2'O-methyl uridine
  modified_base 5: mod_base = OTHER; note = 2'O-methyl adenosine
  modified_base 6: mod_base = OTHER; note = 2'-fluoro cytidine
  modified_base 7: mod_base = OTHER; note = 2'O-methyl cytidine
  modified_base 8: mod_base = OTHER; note = 2'O-methyl adenosine
  modified_base 9: mod_base = OTHER; note = 2'O-methyl adenosine
  modified_base 10: mod_base = OTHER; note = 2'O-methyl guanosine
  modified_base 11: mod_base = OTHER; note = 2'O-methyl guanosine
  modified_base 12: mod_base = OTHER; note = 2'O-methyl cytidine
  modified_base 13: mod_base = OTHER; note = 2'O-methyl adenosine
  modified_base 14: mod_base = OTHER; note = 2'-fluoro uridine
  modified_base 15: mod_base = OTHER; note = 2'O-methyl cytidine
  modified_base 16: mod_base = OTHER; note = 2'-fluoro cytidine
  modified_base 17: mod_base = OTHER; note = 2'O-methyl adenosine
  modified_base 18: mod_base = OTHER; note = 2'O-methyl cytidine
  modified_base 19: mod_base = OTHER; note = 2'O-methyl guanosine
  modified_base 20: mod_base = OTHER; note = 2'O-methyl adenosine
  modified_base 21: mod_base = OTHER; note = 2'O-methyl cytidine phosphorothioate
  modified_base 22: mod_base = OTHER; note = 2'O-methyl uridine phosphorothioate
  modified_base 23: mod_base = OTHER; note = 2'O-methyl uridine
acataccaaggcatccacgactt

SEQ ID NO: 2324 - RNA, 23 nt, synthetic construct
  source 1..23: mol_type = other RNA
  modified_base 1: mod_base = OTHER; note = 5' vinyl phosphonate 2'O-methyl cytidine phosphorothioate
  modified_base 2: mod_base = OTHER; note = 2'-fluoro guanosine phosphorothioate
  modified_base 3: mod_base = OTHER; note = 2'O-methyl guanosine
  modified_base 4: mod_base = OTHER; note = 2'O-methyl uridine
  modified_base 5: mod_base = OTHER; note = 2'O-methyl guanosine
  modified_base 6: mod_base = OTHER; note = 2'-fluoro adenosine
  modified_base 7: mod_base = OTHER; note = 2'O-methyl uridine
  modified_base 8: mod_base = OTHER; note = 2'O-methyl guanosine
  modified_base 9: mod_base = OTHER; note = 2'O-methyl guanosine
  modified_base 10: mod_base = OTHER; note = 2'O-methyl uridine
  modified_base 11: mod_base = OTHER; note = 2'O-methyl uridine
  modified_base 12: mod_base = OTHER; note = 2'O-methyl guanosine
  modified_base 13: mod_base = OTHER; note = 2'O-methyl uridine
  modified_base 14: mod_base = OTHER; note = 2'-fluoro uridine
  modified_base 15: mod_base = OTHER; note = 2'O-methyl uridine
  modified_base 16: mod_base = OTHER; note = 2'-fluoro uridine
  modified_base 17: mod_base = OTHER; note = 2'O-methyl guanosine
  modified_base 18: mod_base = OTHER; note = 2'O-methyl guanosine
  modified_base 19: mod_base = OTHER; note = 2'O-methyl cytidine
  modified_base 20: mod_base = OTHER; note = 2'O-methyl adenosine
  modified_base 21: mod_base = OTHER; note = 2'O-methyl uridine phosphorothioate
  modified_base 22: mod_base = OTHER; note = 2'O-methyl uridine phosphorothioate
  modified_base 23: mod_base = OTHER; note = 2'O-methyl uridine
cggtgatggttgttttggcattt

SEQ ID NO: 2325 - RNA, 23 nt, synthetic construct
  source 1..23: mol_type = other RNA
  modified_base 1: mod_base = OTHER; note = 5' vinyl phosphonate 2'O-methyl uridine phosphorothioate
  modified_base 2: mod_base = OTHER; note = 2'-fluoro adenosine phosphorothioate
  modified_base 3: mod_base = OTHER; note = 2'O-methyl cytidine
  modified_base 4: mod_base = OTHER; note = 2'O-methyl cytidine
  modified_base 5: mod_base = OTHER; note = 2'O-methyl adenosine
  modified_base 6: mod_base = OTHER; note = 2'-fluoro adenosine
  modified_base 7: mod_base = OTHER; note = 2'O-methyl guanosine
  modified_base 8: mod_base = OTHER; note = 2'O-methyl guanosine
  modified_base 9: mod_base = OTHER; note = 2'O-methyl cytidine
  modified_base 10: mod_base = OTHER; note = 2'O-methyl adenosine
  modified_base 11: mod_base = OTHER; note = 2'O-methyl uridine
  modified_base 12: mod_base = OTHER; note = 2'O-methyl cytidine
  modified_base 13: mod_base = OTHER; note = 2'O-methyl cytidine
  modified_base 14: mod_base = OTHER; note = 2'-fluoro adenosine
  modified_base 15: mod_base = OTHER; note = 2'O-methyl cytidine
  modified_base 16: mod_base = OTHER; note = 2'-fluoro guanosine
  modified_base 17: mod_base = OTHER; note = 2'O-methyl adenosine
  modified_base 18: mod_base = OTHER; note = 2'O-methyl cytidine
  modified_base 19: mod_base = OTHER; note = 2'O-methyl uridine
  modified_base 20: mod_base = OTHER; note = 2'O-methyl uridine
  modified_base 21: mod_base = OTHER; note = 2'O-methyl cytidine phosphorothioate
  modified_base 22: mod_base = OTHER; note = 2'O-methyl uridine phosphorothioate
  modified_base 23: mod_base = OTHER; note = 2'O-methyl uridine
taccaaggcatccacgacttctt

SEQ ID NO: 2326 - RNA, 19 nt, synthetic construct
  source 1..19: mol_type = other RNA
  modified_base 1: mod_base = OTHER; note = 2'O-methyl adenosine phosphorothioate
  modified_base 2: mod_base = OTHER; note = 2'O-methyl cytidine phosphorothioate
  modified_base 3: mod_base = OTHER; note = 2'O-methyl adenosine
  modified_base 4: mod_base = OTHER; note = 2'O-methyl uridine
  modified_base 5: mod_base = OTHER; note = 2'-fluoro cytidine
  modified_base 6: mod_base = OTHER; note = 2'O-methyl uridine
  modified_base 7: mod_base = OTHER; note = 2'-fluoro guanosine
  modified_base 8: mod_base = OTHER; note = 2'-fluoro cytidine
  modified_base 9: mod_base = OTHER; note = 2'-fluoro cytidine
  modified_base 10: mod_base = OTHER; note = 2'O-methyl cytidine
  modified_base 11: mod_base = OTHER; note = 2'O-methyl uridine
  modified_base 12: mod_base = OTHER; note = 2'O-methyl adenosine
  modified_base 13: mod_base = OTHER; note = 2'O-methyl adenosine
  modified_base 14: mod_base = OTHER; note = 2'O-methyl adenosine
  modified_base 15: mod_base = OTHER; note = 2'O-methyl guanosine
  modified_base 16: mod_base = OTHER; note = 2'O-methyl uridine
  modified_base 17: mod_base = OTHER; note = 2'O-methyl cytidine
  modified_base 18: mod_base = OTHER; note = 2'O-methyl adenosine
  modified_base 19: mod_base = OTHER; note = 2'O-methyl adenosine 6-(5-(((2R,3R,4R,5R,6R)-3-acetamido-4,5-dihydroxy-6-(hydrox ymethyl)tetrahydro-2H-pyran-2-yl)oxy)pentanamido)-N-(6-(4-( hydroxymethyl)-4-(methoxymethyl)piperidin-1-yl)-6-oxohexyl) hexanamide-phosphorothioate-6-(5-(((2R,3R,4R,5R,6R)-3-aceta mido-4,5-dihydroxy-6-(hydroxymethyl)tetrahydro-2H-pyran-2-y l)oxy)pentanamido)-N-(6-(4-(hydroxymethyl)-4-(methoxymethyl )piperidin-1-yl)-6-oxohexyl)hexanamide-phosphorothioate-6-( 5-(((2R,3R,4R,5R,6R)-3-acetamido-4,5-dihydroxy-6-(hydroxyme thyl)tetrahydro-2H-pyran-2-yl)oxy)pentanamido)-N-(6-(4-(hyd roxymethyl)-4-(methoxymethyl)piperidin-1-yl)-6-oxohexyl)hex anamide
acatctgccctaaagtcaa

SEQ ID NO: 2327 - RNA, 19 nt, synthetic construct
  source 1..19: mol_type = other RNA
  modified_base 1: mod_base = OTHER; note = 2'O-methyl adenosine phosphorothioate
  modified_base 2: mod_base = OTHER; note = 2'O-methyl cytidine phosphorothioate
  modified_base 3: mod_base = OTHER; note = 2'O-methyl adenosine
  modified_base 4: mod_base = OTHER; note = 2'O-methyl uridine
  modified_base 5: mod_base = OTHER; note = 2'-fluoro cytidine
  modified_base 6: mod_base = OTHER; note = 2'O-methyl uridine
  modified_base 7: mod_base = OTHER; note = 2'-fluoro guanosine
  modified_base 8: mod_base = OTHER; note = 2'-fluoro cytidine
  modified_base 9: mod_base = OTHER; note = 2'-fluoro cytidine
  modified_base 10: mod_base = OTHER; note = 2'O-methyl cytidine
  modified_base 11: mod_base = OTHER; note = 2'O-methyl uridine
  modified_base 12: mod_base = OTHER; note = 2'O-methyl adenosine
  modified_base 13: mod_base = OTHER; note = 2'O-methyl adenosine
  modified_base 14: mod_base = OTHER; note = 2'O-methyl adenosine
  modified_base 15: mod_base = OTHER; note = 2'O-methyl guanosine
  modified_base 16: mod_base = OTHER; note = 2'O-methyl uridine
  modified_base 17: mod_base = OTHER; note = 2'O-methyl cytidine
  modified_base 18: mod_base = OTHER; note = 2'O-methyl adenosine
  modified_base 19: mod_base = OTHER; note = 2'O-methyl adenosine 6-(5-(((2R,3R,4R,5R,6R)-3-acetamido-4,5-dihydroxy-6-(hydrox ymethyl)tetrahydro-2H-pyran-2-yl)oxy)pentanamido)-N-(6-(4-( hydroxymethyl)-4-(methoxymethyl)piperidin-1-yl)-6-oxohexyl) hexanamide-phosphorothioate-6-(5-(((2R,3R,4R,5R,6R)-3-aceta mido-4,5-dihydroxy-6-(hydroxymethyl)tetrahydro-2H-pyran-2-y l)oxy)pentanamido)-N-(6-(4-(hydroxymethyl)-4-(methoxymethyl )piperidin-1-yl)-6-oxohexyl)hexanamide-phosphorothioate-6-( 5-(((2R,3R,4R,5R,6R)-3-acetamido-4,5-dihydroxy-6-(hydroxyme thyl)tetrahydro-2H-pyran-2-yl)oxy)pentanamido)-N-(6-(4-(hyd roxymethyl)-4-(methoxymethyl)piperidin-1-yl)-6-oxohexyl)hex anamide
acatctgccctaaagtcaa

SEQ ID NO: 2328 - RNA, 19 nt, synthetic construct
  source 1..19: mol_type = other RNA
  modified_base 1: mod_base = OTHER; note = 2'O-methyl adenosine phosphorothioate
  modified_base 2: mod_base = OTHER; note = 2'O-methyl cytidine phosphorothioate
  modified_base 3: mod_base = OTHER; note = 2'O-methyl adenosine
  modified_base 4: mod_base = OTHER; note = 2'O-methyl uridine
  modified_base 5: mod_base = OTHER; note = 2'-fluoro cytidine
  modified_base 6: mod_base = OTHER; note = 2'O-methyl uridine
  modified_base 7: mod_base = OTHER; note = 2'-fluoro guanosine
  modified_base 8: mod_base = OTHER; note = 2'-fluoro cytidine
  modified_base 9: mod_base = OTHER; note = 2'-fluoro cytidine
  modified_base 10: mod_base = OTHER; note = 2'O-methyl cytidine
  modified_base 11: mod_base = OTHER; note = 2'O-methyl uridine
  modified_base 12: mod_base = OTHER; note = 2'O-methyl adenosine
  modified_base 13: mod_base = OTHER; note = 2'O-methyl adenosine
  modified_base 14: mod_base = OTHER; note = 2'O-methyl adenosine
  modified_base 15: mod_base = OTHER; note = 2'O-methyl guanosine
  modified_base 16: mod_base = OTHER; note = 2'O-methyl uridine
  modified_base 17: mod_base = OTHER; note = 2'O-methyl cytidine
  modified_base 18: mod_base = OTHER; note = 2'O-methyl adenosine
  modified_base 19: mod_base = OTHER; note = 2'O-methyl adenosine 6-(5-(((2R,3R,4R,5R,6R)-3-acetamido-4,5-dihydroxy-6-(hydrox ymethyl)tetrahydro-2H-pyran-2-yl)oxy)pentanamido)-N-(6-(4-( hydroxymethyl)-4-(methoxymethyl)piperidin-1-yl)-6-oxohexyl) hexanamide-phosphorothioate-6-(5-(((2R,3R,4R,5R,6R)-3-aceta mido-4,5-dihydroxy-6-(hydroxymethyl)tetrahydro-2H-pyran-2-y l)oxy)pentanamido)-N-(6-(4-(hydroxymethyl)-4-(methoxymethyl )piperidin-1-yl)-6-oxohexyl)hexanamide-phosphorothioate-6-( 5-(((2R,3R,4R,5R,6R)-3-acetamido-4,5-dihydroxy-6-(hydroxyme thyl)tetrahydro-2H-pyran-2-yl)oxy)pentanamido)-N-(6-(4-(hyd roxymethyl)-4-(methoxymethyl)piperidin-1-yl)-6-oxohexyl)hex anamide
acatctgccctaaagtcaa

SEQ ID NO: 2329 - RNA, 19 nt, synthetic construct
  source 1..19: mol_type = other RNA
  modified_base 1: mod_base = OTHER; note = 2'O-methyl adenosine phosphorothioate
  modified_base 2: mod_base = OTHER; note = 2'O-methyl cytidine phosphorothioate
  modified_base 3: mod_base = OTHER; note = 2'O-methyl adenosine
  modified_base 4: mod_base = OTHER; note = 2'O-methyl uridine
  modified_base 5: mod_base = OTHER; note = 2'-fluoro cytidine
  modified_base 6: mod_base = OTHER; note = 2'O-methyl uridine
  modified_base 7: mod_base = OTHER; note = 2'-fluoro guanosine
  modified_base 8: mod_base = OTHER; note = 2'-fluoro cytidine
  modified_base 9: mod_base = OTHER; note = 2'-fluoro cytidine
  modified_base 10: mod_base = OTHER; note = 2'O-methyl cytidine
  modified_base 11: mod_base = OTHER; note = 2'O-methyl uridine
  modified_base 12: mod_base = OTHER; note = 2'O-methyl adenosine
  modified_base 13: mod_base = OTHER; note = 2'O-methyl adenosine
  modified_base 14: mod_base = OTHER; note = 2'O-methyl adenosine
  modified_base 15: mod_base = OTHER; note = 2'O-methyl guanosine
  modified_base 16: mod_base = OTHER; note = 2'O-methyl uridine
  modified_base 17: mod_base = OTHER; note = 2'O-methyl cytidine
  modified_base 18: mod_base = OTHER; note = 2'O-methyl adenosine
  modified_base 19: mod_base = OTHER; note = 2'O-methyl adenosine 6-(5-(((2R,3R,4R,5R,6R)-3-acetamido-4,5-dihydroxy-6-(hydrox ymethyl)tetrahydro-2H-pyran-2-yl)oxy)pentanamido)-N-(6-(4-( hydroxymethyl)-4-(methoxymethyl)piperidin-1-yl)-6-oxohexyl) hexanamide-phosphorothioate-6-(5-(((2R,3R,4R,5R,6R)-3-aceta mido-4,5-dihydroxy-6-(hydroxymethyl)tetrahydro-2H-pyran-2-y l)oxy)pentanamido)-N-(6-(4-(hydroxymethyl)-4-(methoxymethyl )piperidin-1-yl)-6-oxohexyl)hexanamide-phosphorothioate-6-( 5-(((2R,3R,4R,5R,6R)-3-acetamido-4,5-dihydroxy-6-(hydroxyme thyl)tetrahydro-2H-pyran-2-yl)oxy)pentanamido)-N-(6-(4-(hyd roxymethyl)-4-(methoxymethyl)piperidin-1-yl)-6-oxohexyl)hex anamide
acatctgccctaaagtcaa

SEQ ID NO: 2330 - RNA, 19 nt, synthetic construct
  source 1..19: mol_type = other RNA
  modified_base 1: mod_base = OTHER; note = 2'O-methyl adenosine phosphorothioate
  modified_base 2: mod_base = OTHER; note = 2'O-methyl cytidine phosphorothioate
  modified_base 3: mod_base = OTHER; note = 2'O-methyl adenosine
  modified_base 4: mod_base = OTHER; note = 2'O-methyl uridine
  modified_base 5: mod_base = OTHER; note = 2'-fluoro-2-Pyridone
  modified_base 6: mod_base = OTHER; note = 2'O-methyl uridine
  modified_base 7: mod_base = OTHER; note = 2'-fluoro guanosine
  modified_base 8: mod_base = OTHER; note = 2'-fluoro cytidine
  modified_base 9: mod_base = OTHER; note = 2'-fluoro cytidine
  modified_base 10: mod_base = OTHER; note = 2'O-methyl cytidine
  modified_base 11: mod_base = OTHER; note = 2'O-methyl uridine
  modified_base 12: mod_base = OTHER; note = 2'O-methyl adenosine
  modified_base 13: mod_base = OTHER; note = 2'O-methyl adenosine
  modified_base 14: mod_base = OTHER; note = 2'O-methyl adenosine
  modified_base 15: mod_base = OTHER; note = 2'O-methyl guanosine
  modified_base 16: mod_base = OTHER; note = 2'O-methyl uridine
  modified_base 17: mod_base = OTHER; note = 2'O-methyl cytidine
  modified_base 18: mod_base = OTHER; note = 2'O-methyl adenosine
  modified_base 19: mod_base = OTHER; note = 2'O-methyl adenosine 6-(5-(((2R,3R,4R,5R,6R)-3-acetamido-4,5-dihydroxy-6-(hydrox ymethyl)tetrahydro-2H-pyran-2-yl)oxy)pentanamido)-N-(6-(4-( hydroxymethyl)-4-(methoxymethyl)piperidin-1-yl)-6-oxohexyl) hexanamide-phosphorothioate-6-(5-(((2R,3R,4R,5R,6R)-3-aceta mido-4,5-dihydroxy-6-(hydroxymethyl)tetrahydro-2H-pyran-2-y l)oxy)pentanamido)-N-(6-(4-(hydroxymethyl)-4-(methoxymethyl )piperidin-1-yl)-6-oxohexyl)hexanamide-phosphorothioate-6-( 5-(((2R,3R,4R,5R,6R)-3-acetamido-4,5-dihydroxy-6-(hydroxyme thyl)tetrahydro-2H-pyran-2-yl)oxy)pentanamido)-N-(6-(4-(hyd roxymethyl)-4-(methoxymethyl)piperidin-1-yl)-6-oxohexyl)hex anamide
acatntgccctaaagtcaa

SEQ ID NO: 2331 - RNA, 19 nt, synthetic construct
  source 1..19: mol_type = other RNA
  modified_base 1: mod_base = OTHER; note = 2'O-methyl adenosine phosphorothioate
  modified_base 2: mod_base = OTHER; note = 2'O-methyl cytidine phosphorothioate
  modified_base 3: mod_base = OTHER; note = 2'O-methyl adenosine
  modified_base 4: mod_base = OTHER; note = 2'O-methyl uridine
  modified_base 5: mod_base = OTHER; note = 2'-fluoro-2-Pyridone
  modified_base 6: mod_base = OTHER; note = 2'O-methyl uridine
  modified_base 7: mod_base = OTHER; note = 2'-fluoro guanosine
  modified_base 8: mod_base = OTHER; note = 2'-fluoro cytidine
  modified_base 9: mod_base = OTHER; note = 2'-fluoro cytidine
  modified_base 10: mod_base = OTHER; note = 2'O-methyl cytidine
  modified_base 11: mod_base = OTHER; note = 2'O-methyl uridine
  modified_base 12: mod_base = OTHER; note = 2'O-methyl adenosine
  modified_base 13: mod_base = OTHER; note = 2'O-methyl adenosine
  modified_base 14: mod_base = OTHER; note = 2'O-methyl adenosine
  modified_base 15: mod_base = OTHER; note = 2'O-methyl guanosine
  modified_base 16: mod_base = OTHER; note = 2'O-methyl uridine
  modified_base 17: mod_base = OTHER; note = 2'O-methyl cytidine
  modified_base 18: mod_base = OTHER; note = 2'O-methyl adenosine
  modified_base 19: mod_base = OTHER; note = 2'O-methyl adenosine 6-(5-(((2R,3R,4R,5R,6R)-3-acetamido-4,5-dihydroxy-6-(hydrox ymethyl)tetrahydro-2H-pyran-2-yl)oxy)pentanamido)-N-(6-(4-( hydroxymethyl)-4-(methoxymethyl)piperidin-1-yl)-6-oxohexyl) hexanamide-phosphorothioate-6-(5-(((2R,3R,4R,5R,6R)-3-aceta mido-4,5-dihydroxy-6-(hydroxymethyl)tetrahydro-2H-pyran-2-y l)oxy)pentanamido)-N-(6-(4-(hydroxymethyl)-4-(methoxymethyl )piperidin-1-yl)-6-oxohexyl)hexanamide-phosphorothioate-6-( 5-(((2R,3R,4R,5R,6R)-3-acetamido-4,5-dihydroxy-6-(hydroxyme thyl)tetrahydro-2H-pyran-2-yl)oxy)pentanamido)-N-(6-(4-(hyd roxymethyl)-4-(methoxymethyl)piperidin-1-yl)-6-oxohexyl)hex anamide
acatntgccctaaagtcaa

SEQ ID NO: 2332 - RNA, 19 nt, synthetic construct
  source 1..19: mol_type = other RNA
  modified_base 1: mod_base = OTHER; note = 2'O-methyl adenosine phosphorothioate
  modified_base 2: mod_base = OTHER; note = 2'O-methyl cytidine phosphorothioate
  modified_base 3: mod_base = OTHER; note = 2'O-methyl adenosine
  modified_base 4: mod_base = OTHER; note = 2'O-methyl uridine
  modified_base 5: mod_base = OTHER; note = 2'-fluoro cytidine
  modified_base 6: mod_base = OTHER; note = 2'O-methyl uridine
  modified_base 7: mod_base = OTHER; note = 2'-fluoro guanosine
  modified_base 8: mod_base = OTHER; note = 2'-fluoro cytidine
  modified_base 9: mod_base = OTHER; note = 2'-fluoro-2-Pyridone
  modified_base 10: mod_base = OTHER; note = 2'O-methyl cytidine
  modified_base 11: mod_base = OTHER; note = 2'O-methyl uridine
  modified_base 12: mod_base = OTHER; note = 2'O-methyl adenosine
  modified_base 13: mod_base = OTHER; note = 2'O-methyl adenosine
  modified_base 14: mod_base = OTHER; note = 2'O-methyl adenosine
  modified_base 15: mod_base = OTHER; note = 2'O-methyl guanosine
  modified_base 16: mod_base = OTHER; note = 2'O-methyl uridine
  modified_base 17: mod_base = OTHER; note = 2'O-methyl cytidine
  modified_base 18: mod_base = OTHER; note = 2'O-methyl adenosine
  modified_base 19: mod_base = OTHER; note = 2'O-methyl adenosine 6-(5-(((2R,3R,4R,5R,6R)-3-acetamido-4,5-dihydroxy-6-(hydrox ymethyl)tetrahydro-2H-pyran-2-yl)oxy)pentanamido)-N-(6-(4-( hydroxymethyl)-4-(methoxymethyl)piperidin-1-yl)-6-oxohexyl) hexanamide-phosphorothioate-6-(5-(((2R,3R,4R,5R,6R)-3-aceta mido-4,5-dihydroxy-6-(hydroxymethyl)tetrahydro-2H-pyran-2-y l)oxy)pentanamido)-N-(6-(4-(hydroxymethyl)-4-(methoxymethyl )piperidin-1-yl)-6-oxohexyl)hexanamide-phosphorothioate-6-( 5-(((2R,3R,4R,5R,6R)-3-acetamido-4,5-dihydroxy-6-(hydroxyme thyl)tetrahydro-2H-pyran-2-yl)oxy)pentanamido)-N-(6-(4-(hyd roxymethyl)-4-(methoxymethyl)piperidin-1-yl)-6-oxohexyl)hex anamide
acatctgcnctaaagtcaa

SEQ ID NO: 2333 - RNA, 19 nt, synthetic construct
  source 1..19: mol_type = other RNA
  modified_base 1: mod_base = OTHER; note = 2'O-methyl adenosine phosphorothioate
  modified_base 2: mod_base = OTHER; note = 2'O-methyl cytidine phosphorothioate
  modified_base 3: mod_base = OTHER; note = 2'O-methyl adenosine
  modified_base 4: mod_base = OTHER; note = 2'O-methyl uridine
  modified_base 5: mod_base = OTHER; note = 2'-fluoro cytidine
  modified_base 6: mod_base = OTHER; note = 2'O-methyl uridine
  modified_base 7: mod_base = OTHER; note = 2'-fluoro guanosine
  modified_base 8: mod_base = OTHER; note = 2'-fluoro cytidine
  modified_base 9: mod_base = OTHER; note = 2'-fluoro-2-Pyridone
  modified_base 10: mod_base = OTHER; note = 2'O-methyl cytidine
  modified_base 11: mod_base = OTHER; note = 2'O-methyl uridine
  modified_base 12: mod_base = OTHER; note = 2'O-methyl adenosine
  modified_base 13: mod_base = OTHER; note = 2'O-methyl adenosine
  modified_base 14: mod_base = OTHER; note = 2'O-methyl adenosine
  modified_base 15: mod_base = OTHER; note = 2'O-methyl guanosine
  modified_base 16: mod_base = OTHER; note = 2'O-methyl uridine
  modified_base 17: mod_base = OTHER; note = 2'O-methyl cytidine
  modified_base 18: mod_base = OTHER; note = 2'O-methyl adenosine
  modified_base 19: mod_base = OTHER; note = 2'O-methyl adenosine 6-(5-(((2R,3R,4R,5R,6R)-3-acetamido-4,5-dihydroxy-6-(hydrox ymethyl)tetrahydro-2H-pyran-2-yl)oxy)pentanamido)-N-(6-(4-( hydroxymethyl)-4-(methoxymethyl)piperidin-1-yl)-6-oxohexyl) hexanamide-phosphorothioate-6-(5-(((2R,3R,4R,5R,6R)-3-aceta mido-4,5-dihydroxy-6-(hydroxymethyl)tetrahydro-2H-pyran-2-y l)oxy)pentanamido)-N-(6-(4-(hydroxymethyl)-4-(methoxymethyl )piperidin-1-yl)-6-oxohexyl)hexanamide-phosphorothioate-6-( 5-(((2R,3R,4R,5R,6R)-3-acetamido-4,5-dihydroxy-6-(hydroxyme thyl)tetrahydro-2H-pyran-2-yl)oxy)pentanamido)-N-(6-(4-(hyd roxymethyl)-4-(methoxymethyl)piperidin-1-yl)-6-oxohexyl)hex anamide
acatctgcnctaaagtcaa

SEQ ID NO: 2334 - RNA, 19 nt, synthetic construct
  source 1..19: mol_type = other RNA
  modified_base 1: mod_base = OTHER; note = 2'O-methyl guanosine phosphorothioate
  modified_base 2: mod_base = OTHER; note = 2'O-methyl cytidine phosphorothioate
  modified_base 3: mod_base = OTHER; note = 2'O-methyl cytidine
  modified_base 4: mod_base = OTHER; note = 2'O-methyl uridine
  modified_base 5: mod_base = OTHER; note = 2'-fluoro guanosine
  modified_base 6: mod_base = OTHER; note = 2'O-methyl uridine
  modified_base 7: mod_base = OTHER; note = 2'-fluoro guanosine
  modified_base 8: mod_base = OTHER; note = 2'-fluoro guanosine
  modified_base 9: mod_base = OTHER; note = 2'-fluoro adenosine
  modified_base 10: mod_base = OTHER; note = 2'O-methyl adenosine
  modified_base 11: mod_base = OTHER; note = 2'O-methyl uridine
  modified_base 12: mod_base = OTHER; note = 2'O-methyl cytidine
  modified_base 13: mod_base = OTHER; note = 2'O-methyl uridine
  modified_base 14: mod_base = OTHER; note = 2'O-methyl guanosine
  modified_base 15: mod_base = OTHER; note = 2'O-methyl cytidine
  modified_base 16: mod_base = OTHER; note = 2'O-methyl cytidine
  modified_base 17: mod_base = OTHER; note = 2'O-methyl adenosine
  modified_base 18: mod_base = OTHER; note = 2'O-methyl uridine
  modified_base 19: mod_base = OTHER; note = 2'O-methyl uridine 6-(5-(((2R,3R,4R,5R,6R)-3-acetamido-4,5-dihydroxy-6-(hydrox ymethyl)tetrahydro-2H-pyran-2-yl)oxy)pentanamido)-N-(6-(4-( hydroxymethyl)-4-(methoxymethyl)piperidin-1-yl)-6-oxohexyl) hexanamide-phosphorothioate-6-(5-(((2R,3R,4R,5R,6R)-3-aceta mido-4,5-dihydroxy-6-(hydroxymethyl)tetrahydro-2H-pyran-2-y l)oxy)pentanamido)-N-(6-(4-(hydroxymethyl)-4-(methoxymethyl )piperidin-1-yl)-6-oxohexyl)hexanamide-phosphorothioate-6-( 5-(((2R,3R,4R,5R,6R)-3-acetamido-4,5-dihydroxy-6-(hydroxyme thyl)tetrahydro-2H-pyran-2-yl)oxy)pentanamido)-N-(6-(4-(hyd roxymethyl)-4-(methoxymethyl)piperidin-1-yl)-6-oxohexyl)hex anamide
gcctgtggaatctgccatt

SEQ ID NO: 2335 - RNA, 19 nt, synthetic construct
  source 1..19: mol_type = other RNA
  modified_base 1: mod_base = OTHER; note = 2'O-methyl guanosine phosphorothioate
  modified_base 2: mod_base = OTHER; note = 2'O-methyl cytidine phosphorothioate
  modified_base 3: mod_base = OTHER; note = 2'O-methyl cytidine
  modified_base 4: mod_base = OTHER; note = 2'O-methyl uridine
  modified_base 5: mod_base = OTHER; note = 2'-fluoro guanosine
  modified_base 6: mod_base = OTHER; note = 2'O-methyl uridine
  modified_base 7: mod_base = OTHER; note = 2'-fluoro guanosine
  modified_base 8: mod_base = OTHER; note = 2'-fluoro guanosine
  modified_base 9: mod_base = OTHER; note = 2'-fluoro adenosine
  modified_base 10: mod_base = OTHER; note = 2'O-methyl adenosine
  modified_base 11: mod_base = OTHER; note = 2'O-methyl uridine
  modified_base 12: mod_base = OTHER; note = 2'O-methyl cytidine
  modified_base 13: mod_base = OTHER; note = 2'O-methyl uridine
  modified_base 14: mod_base = OTHER; note = 2'O-methyl guanosine
  modified_base 15: mod_base = OTHER; note = 2'O-methyl cytidine
  modified_base 16: mod_base = OTHER; note = 2'O-methyl cytidine
  modified_base 17: mod_base = OTHER; note = 2'O-methyl adenosine
  modified_base 18: mod_base = OTHER; note = 2'O-methyl uridine
  modified_base 19: mod_base = OTHER; note = 2'O-methyl uridine 6-(5-(((2R,3R,4R,5R,6R)-3-acetamido-4,5-dihydroxy-6-(hydrox ymethyl)tetrahydro-2H-pyran-2-yl)oxy)pentanamido)-N-(6-(4-( hydroxymethyl)-4-(methoxymethyl)piperidin-1-yl)-6-oxohexyl) hexanamide-phosphorothioate-6-(5-(((2R,3R,4R,5R,6R)-3-aceta mido-4,5-dihydroxy-6-(hydroxymethyl)tetrahydro-2H-pyran-2-y l)oxy)pentanamido)-N-(6-(4-(hydroxymethyl)-4-(methoxymethyl )piperidin-1-yl)-6-oxohexyl)hexanamide-phosphorothioate-6-( 5-(((2R,3R,4R,5R,6R)-3-acetamido-4,5-dihydroxy-6-(hydroxyme thyl)tetrahydro-2H-pyran-2-yl)oxy)pentanamido)-N-(6-(4-(hyd roxymethyl)-4-(methoxymethyl)piperidin-1-yl)-6-oxohexyl)hex anamide
gcctgtggaatctgccatt

SEQ ID NO: 2336 - RNA, 19 nt, synthetic construct
  source 1..19: mol_type = other RNA
  modified_base 1: mod_base = OTHER; note = 2'O-methyl guanosine phosphorothioate
  modified_base 2: mod_base = OTHER; note = 2'O-methyl cytidine phosphorothioate
  modified_base 3: mod_base = OTHER; note = 2'O-methyl cytidine
  modified_base 4: mod_base = OTHER; note = 2'O-methyl uridine
  modified_base 5: mod_base = OTHER; note = 2'-fluoro guanosine
  modified_base 6: mod_base = OTHER; note = 2'O-methyl uridine
  modified_base 7: mod_base = OTHER; note = 2'-fluoro guanosine
  modified_base 8: mod_base = OTHER; note = 2'-fluoro guanosine
  modified_base 9: mod_base = OTHER; note = 2'-fluoro adenosine
  modified_base 10: mod_base = OTHER; note = 2'O-methyl adenosine
  modified_base 11: mod_base = OTHER; note = 2'O-methyl uridine
  modified_base 12: mod_base = OTHER; note = 2'O-methyl cytidine
  modified_base 13: mod_base = OTHER; note = 2'O-methyl uridine
  modified_base 14: mod_base = OTHER; note = 2'O-methyl guanosine
  modified_base 15: mod_base = OTHER; note = 2'O-methyl cytidine
  modified_base 16: mod_base = OTHER; note = 2'O-methyl cytidine
  modified_base 17: mod_base = OTHER; note = 2'O-methyl adenosine
  modified_base 18: mod_base = OTHER; note = 2'O-methyl uridine
  modified_base 19: mod_base = OTHER; note = 2'O-methyl uridine 6-(5-(((2R,3R,4R,5R,6R)-3-acetamido-4,5-dihydroxy-6-(hydrox ymethyl)tetrahydro-2H-pyran-2-yl)oxy)pentanamido)-N-(6-(4-( hydroxymethyl)-4-(methoxymethyl)piperidin-1-yl)-6-oxohexyl) hexanamide-phosphorothioate-6-(5-(((2R,3R,4R,5R,6R)-3-aceta mido-4,5-dihydroxy-6-(hydroxymethyl)tetrahydro-2H-pyran-2-y l)oxy)pentanamido)-N-(6-(4-(hydroxymethyl)-4-(methoxymethyl )piperidin-1-yl)-6-oxohexyl)hexanamide-phosphorothioate-6-( 5-(((2R,3R,4R,5R,6R)-3-acetamido-4,5-dihydroxy-6-(hydroxyme thyl)tetrahydro-2H-pyran-2-yl)oxy)pentanamido)-N-(6-(4-(hyd roxymethyl)-4-(methoxymethyl)piperidin-1-yl)-6-oxohexyl)hex anamide
gcctgtggaatctgccatt

SEQ ID NO: 2337 - RNA, 19 nt, synthetic construct
  source 1..19: mol_type = other RNA
  modified_base 1: mod_base = OTHER; note = 2'O-methyl guanosine phosphorothioate
  modified_base 2: mod_base = OTHER; note = 2'O-methyl cytidine phosphorothioate
  modified_base 3: mod_base = OTHER; note = 2'O-methyl cytidine
  modified_base 4: mod_base = OTHER; note = 2'O-methyl uridine
  modified_base 5: mod_base = OTHER; note = 2'-fluoro guanosine
  modified_base 6: mod_base = OTHER; note = 2'O-methyl uridine
  modified_base 7: mod_base = OTHER; note = 2'-fluoro guanosine
  modified_base 8: mod_base = OTHER; note = 2'-fluoro guanosine
  modified_base 9: mod_base = OTHER; note = 2'-fluoro adenosine
  modified_base 10: mod_base = OTHER; note = 2'O-methyl adenosine
  modified_base 11: mod_base = OTHER; note = 2'O-methyl uridine
  modified_base 12: mod_base = OTHER; note = 2'O-methyl cytidine
  modified_base 13: mod_base = OTHER; note = 2'O-methyl uridine
  modified_base 14: mod_base = OTHER; note = 2'O-methyl guanosine
  modified_base 15: mod_base = OTHER; note = 2'O-methyl cytidine
  modified_base 16: mod_base = OTHER; note = 2'O-methyl cytidine
  modified_base 17: mod_base = OTHER; note = 2'O-methyl adenosine
  modified_base 18: mod_base = OTHER; note = 2'O-methyl uridine
  modified_base 19: mod_base = OTHER; note = 2'O-methyl uridine 6-(5-(((2R,3R,4R,5R,6R)-3-acetamido-4,5-dihydroxy-6-(hydrox ymethyl)tetrahydro-2H-pyran-2-yl)oxy)pentanamido)-N-(6-(4-( hydroxymethyl)-4-(methoxymethyl)piperidin-1-yl)-6-oxohexyl) hexanamide-phosphorothioate-6-(5-(((2R,3R,4R,5R,6R)-3-aceta mido-4,5-dihydroxy-6-(hydroxymethyl)tetrahydro-2H-pyran-2-y l)oxy)pentanamido)-N-(6-(4-(hydroxymethyl)-4-(methoxymethyl )piperidin-1-yl)-6-oxohexyl)hexanamide-phosphorothioate-6-( 5-(((2R,3R,4R,5R,6R)-3-acetamido-4,5-dihydroxy-6-(hydroxyme thyl)tetrahydro-2H-pyran-2-yl)oxy)pentanamido)-N-(6-(4-(hyd roxymethyl)-4-(methoxymethyl)piperidin-1-yl)-6-oxohexyl)hex anamide
gcctgtggaatctgccatt

SEQ ID NO: 2338 - RNA, 21 nt, synthetic construct
  source 1..21: mol_type = other RNA
  modified_base 1: mod_base = OTHER; note = 2'O-methyl uridine phosphorothioate
  modified_base 2: mod_base = OTHER; note = 2'O-methyl adenosine phosphorothioate
  modified_base 3: mod_base = OTHER; note = 2'O-methyl cytidine
  modified_base 4: mod_base = OTHER; note = 2'O-methyl cytidine
  modified_base 5: mod_base = OTHER; note = 2'O-methyl adenosine
  modified_base 6: mod_base = OTHER; note = 2'O-methyl guanosine
  modified_base 7: mod_base = OTHER; note = 2'-fluoro adenosine
  modified_base 8: mod_base = OTHER; note = 2'O-methyl guanosine
  modified_base 9: mod_base = OTHER; note = 2'-fluoro uridine
  modified_base 10: mod_base = OTHER; note = 2'-fluoro guanosine
  modified_base 11: mod_base = OTHER; note = 2'-fluoro uridine
  modified_base 12: mod_base = OTHER; note = 2'O-methyl cytidine
  modified_base 13: mod_base = OTHER; note = 2'O-methyl uridine
  modified_base 14: mod_base = OTHER; note = 2'O-methyl guanosine
  modified_base 15: mod_base = OTHER; note = 2'O-methyl adenosine
  modified_base 16: mod_base = OTHER; note = 2'O-methyl uridine
  modified_base 17: mod_base = OTHER; note = 2'O-methyl guanosine
  modified_base 18: mod_base = OTHER; note = 2'O-methyl guanosine
  modified_base 19: mod_base = OTHER; note = 2'O-methyl guanosine
  modified_base 20: mod_base = OTHER; note = 2'O-methyl guanosine
  modified_base 21: mod_base = OTHER; note = 2'O-methyl adenosine 6-(5-(((2R,3R,4R,5R,6R)-3-acetamido-4,5-dihydroxy-6-(hydrox ymethyl)tetrahydro-2H-pyran-2-yl)oxy)pentanamido)-N-(6-(4-( hydroxymethyl)-4-(methoxymethyl)piperidin-1-yl)-6-oxohexyl) hexanamide-phosphorothioate-6-(5-(((2R,3R,4R,5R,6R)-3-aceta mido-4,5-dihydroxy-6-(hydroxymethyl)tetrahydro-2H-pyran-2-y l)oxy)pentanamido)-N-(6-(4-(hydroxymethyl)-4-(methoxymethyl )piperidin-1-yl)-6-oxohexyl)hexanamide-phosphorothioate-6-( 5-(((2R,3R,4R,5R,6R)-3-acetamido-4,5-dihydroxy-6-(hydroxyme thyl)tetrahydro-2H-pyran-2-yl)oxy)pentanamido)-N-(6-(4-(hyd roxymethyl)-4-(methoxymethyl)piperidin-1-yl)-6-oxohexyl)hex anamide
taccagagtgtctgatgggga

SEQ ID NO: 2339 - RNA, 21 nt, synthetic construct
  source 1..21: mol_type = other RNA
  modified_base 1: mod_base = OTHER; note = 2'O-methyl cytidine phosphorothioate
  modified_base 2: mod_base = OTHER; note = 2'O-methyl guanosine phosphorothioate
  modified_base 3: mod_base = OTHER; note = 2'O-methyl adenosine
  modified_base 4: mod_base = OTHER; note = 2'O-methyl cytidine
  modified_base 5: mod_base = OTHER; note = 2'O-methyl adenosine
  modified_base 6: mod_base = OTHER; note = 2'O-methyl uridine
  modified_base 7: mod_base = OTHER; note = 2'-fluoro cytidine
  modified_base 8: mod_base = OTHER; note = 2'O-methyl uridine
  modified_base 9: mod_base = OTHER; note = 2'-fluoro guanosine
  modified_base 10: mod_base = OTHER; note = 2'-fluoro cytidine
  modified_base 11: mod_base = OTHER; note = 2'-fluoro cytidine
  modified_base 12: mod_base = OTHER; note = 2'O-methyl cytidine
  modified_base 13: mod_base = OTHER; note = 2'O-methyl uridine
  modified_base 14: mod_base = OTHER; note = 2'O-methyl adenosine
  modified_base 15: mod_base = OTHER; note = 2'O-methyl adenosine
  modified_base 16: mod_base = OTHER; note = 2'O-methyl adenosine
  modified_base 17: mod_base = OTHER; note = 2'O-methyl guanosine
  modified_base 18: mod_base = OTHER; note = 2'O-methyl uridine
  modified_base 19: mod_base = OTHER; note = 2'O-methyl cytidine
  modified_base 20: mod_base = OTHER; note = 2'O-methyl adenosine
  modified_base 21: mod_base = OTHER; note = 2'O-methyl adenosine 6-(5-(((2R,3R,4R,5R,6R)-3-acetamido-4,5-dihydroxy-6-(hydrox ymethyl)tetrahydro-2H-pyran-2-yl)oxy)pentanamido)-N-(6-(4-( hydroxymethyl)-4-(methoxymethyl)piperidin-1-yl)-6-oxohexyl) hexanamide-phosphorothioate-6-(5-(((2R,3R,4R,5R,6R)-3-aceta mido-4,5-dihydroxy-6-(hydroxymethyl)tetrahydro-2H-pyran-2-y l)oxy)pentanamido)-N-(6-(4-(hydroxymethyl)-4-(methoxymethyl )piperidin-1-yl)-6-oxohexyl)hexanamide-phosphorothioate-6-( 5-(((2R,3R,4R,5R,6R)-3-acetamido-4,5-dihydroxy-6-(hydroxyme thyl)tetrahydro-2H-pyran-2-yl)oxy)pentanamido)-N-(6-(4-(hyd roxymethyl)-4-(methoxymethyl)piperidin-1-yl)-6-oxohexyl)hex anamide
cgacatctgccctaaagtcaa

SEQ ID NO: 2340 - RNA, 21 nt, synthetic construct
  source 1..21: mol_type = other RNA
  modified_base 1: mod_base = OTHER; note = 2'O-methyl uridine phosphorothioate
  modified_base 2: mod_base = OTHER; note = 2'-fluoro uridine phosphorothioate
  modified_base 3: mod_base = OTHER; note = 2'O-methyl guanosine
  modified_base 4: mod_base = OTHER; note = 2'O-methyl adenosine
  modified_base 5: mod_base = OTHER; note = 2'O-methyl cytidine
  modified_base 6: mod_base = OTHER; note = 2'-fluoro uridine
  modified_base 7: mod_base = OTHER; note = 2'O-methyl uridine
  modified_base 8: mod_base = OTHER; note = 2'O-methyl uridine
  modified_base 9: mod_base = OTHER; note = 2'O-methyl adenosine
  modified_base 10: mod_base = OTHER; note = 2'O-methyl guanosine
  modified_base 11: mod_base = OTHER; note = 2'O-methyl guanosine
  modified_base 12: mod_base = OTHER; note = 2'O-methyl guanosine
  modified_base 13: mod_base = OTHER; note = 2'O-methyl cytidine
  modified_base 14: mod_base = OTHER; note = 2'-fluoro adenosine
  modified_base 15: mod_base = OTHER; note = 2'O-methyl guanosine
  modified_base 16: mod_base = OTHER; note = 2'-fluoro adenosine
  modified_base 17: mod_base = OTHER; note = 2'O-methyl uridine
  modified_base 18: mod_base = OTHER; note = 2'O-methyl guanosine
  modified_base 19: mod_base = OTHER; note = 2'O-methyl uridine phosphorothioate
  modified_base 20: mod_base = OTHER; note = 2'O-methyl cytidine phosphorothioate
  modified_base 21: mod_base = OTHER; note = 2'O-methyl guanosine
ttgactttagggcagatgtcg

SEQ ID NO: 2341 - RNA, 21 nt, synthetic construct
  source 1..21: mol_type = other RNA
  modified_base 1: mod_base = OTHER; note = 5' vinyl phosphonate 2'O-methyl uridine phosphorothioate
  modified_base 2: mod_base = OTHER; note = 2'-fluoro uridine phosphorothioate
  modified_base 3: mod_base = OTHER; note = 2'O-methyl guanosine
  modified_base 4: mod_base = OTHER; note = 2'O-methyl adenosine
  modified_base 5: mod_base = OTHER; note = 2'O-methyl cytidine
  modified_base 6: mod_base = OTHER; note = 2'-fluoro uridine
  modified_base 7: mod_base = OTHER; note = 2'O-methyl uridine
  modified_base 8: mod_base = OTHER; note = 2'O-methyl uridine
  modified_base 9: mod_base = OTHER; note = 2'O-methyl adenosine
  modified_base 10: mod_base = OTHER; note = 2'O-methyl guanosine
  modified_base 11: mod_base = OTHER; note = 2'O-methyl guanosine
  modified_base 12: mod_base = OTHER; note = 2'O-methyl guanosine
  modified_base 13: mod_base = OTHER; note = 2'O-methyl cytidine
  modified_base 14: mod_base = OTHER; note = 2'-fluoro adenosine
  modified_base 15: mod_base = OTHER; note = 2'O-methyl guanosine
  modified_base 16: mod_base = OTHER; note = 2'-fluoro adenosine
  modified_base 17: mod_base = OTHER; note = 2'O-methyl uridine
  modified_base 18: mod_base = OTHER; note = 2'O-methyl guanosine
  modified_base 19: mod_base = OTHER; note = 2'O-methyl uridine phosphorothioate
  modified_base 20: mod_base = OTHER; note = 2'O-methyl cytidine phosphorothioate
  modified_base 21: mod_base = OTHER; note = 2'O-methyl guanosine
ttgactttagggcagatgtcg

SEQ ID NO: 2342 - RNA, 21 nt, synthetic construct
  source 1..21: mol_type = other RNA
  modified_base 1: mod_base = OTHER; note = 2'O-methyl adenosine phosphorothioate
  modified_base 2: mod_base = OTHER; note = 2'-fluoro uridine phosphorothioate
  modified_base 3: mod_base = OTHER; note = 2'O-methyl guanosine
  modified_base 4: mod_base = OTHER; note = 2'O-methyl adenosine
  modified_base 5: mod_base = OTHER; note = 2'O-methyl cytidine
  modified_base 6: mod_base = OTHER; note = 2'-fluoro uridine
  modified_base 7: mod_base = OTHER; note = 2'O-methyl uridine
  modified_base 8: mod_base = OTHER; note = 2'O-methyl uridine
  modified_base 9: mod_base = OTHER; note = 2'O-methyl adenosine
  modified_base 10: mod_base = OTHER; note = 2'O-methyl guanosine
  modified_base 11: mod_base = OTHER; note = 2'O-methyl guanosine
  modified_base 12: mod_base = OTHER; note = 2'O-methyl guanosine
  modified_base 13: mod_base = OTHER; note = 2'O-methyl cytidine
  modified_base 14: mod_base = OTHER; note = 2'-fluoro adenosine
  modified_base 15: mod_base = OTHER; note = 2'O-methyl guanosine
  modified_base 16: mod_base = OTHER; note = 2'-fluoro adenosine
  modified_base 17: mod_base = OTHER; note = 2'O-methyl uridine
  modified_base 18: mod_base = OTHER; note = 2'O-methyl guanosine
  modified_base 19: mod_base = OTHER; note = 2'O-methyl uridine phosphorothioate
  modified_base 20: mod_base = OTHER; note = 2'O-methyl cytidine phosphorothioate
  modified_base 21: mod_base = OTHER; note = 2'O-methyl guanosine
atgactttagggcagatgtcg

SEQ ID NO: 2343 - RNA, 21 nt, synthetic construct
  source 1..21: mol_type = other RNA
  modified_base 1: mod_base = OTHER; note = 5' vinyl phosphonate 2'O-methyl adenosine phosphorothioate
  modified_base 2: mod_base = OTHER; note = 2'-fluoro uridine phosphorothioate
  modified_base 3: mod_base = OTHER; note = 2'O-methyl guanosine
  modified_base 4: mod_base = OTHER; note = 2'O-methyl adenosine
  modified_base 5: mod_base = OTHER; note = 2'O-methyl cytidine
  modified_base 6: mod_base = OTHER; note = 2'-fluoro uridine
  modified_base 7: mod_base = OTHER; note = 2'O-methyl uridine
  modified_base 8: mod_base = OTHER; note = 2'O-methyl uridine
  modified_base 9: mod_base = OTHER; note = 2'O-methyl adenosine
  modified_base 10: mod_base = OTHER; note = 2'O-methyl guanosine
  modified_base 11: mod_base = OTHER; note = 2'O-methyl guanosine
  modified_base 12: mod_base = OTHER; note = 2'O-methyl guanosine
  modified_base 13: mod_base = OTHER; note = 2'O-methyl cytidine
  modified_base 14: mod_base = OTHER; note = 2'-fluoro adenosine
  modified_base 15: mod_base = OTHER; note = 2'O-methyl guanosine
  modified_base 16: mod_base = OTHER; note = 2'-fluoro adenosine
  modified_base 17: mod_base = OTHER; note = 2'O-methyl uridine
  modified_base 18: mod_base = OTHER; note = 2'O-methyl guanosine
  modified_base 19: mod_base = OTHER; note = 2'O-methyl uridine phosphorothioate
  modified_base 20: mod_base = OTHER; note = 2'O-methyl cytidine phosphorothioate
  modified_base 21: mod_base = OTHER; note = 2'O-methyl guanosine
atgactttagggcagatgtcg

SEQ ID NO: 2344 - RNA, 21 nt, synthetic construct
  source 1..21: mol_type = other RNA
  modified_base 1: mod_base = OTHER; note = 2'O-methyl uridine phosphorothioate
  modified_base 2: mod_base = OTHER; note = 2'-fluoro uridine phosphorothioate
  modified_base 3: mod_base = OTHER; note = 2'O-methyl guanosine
  modified_base 4: mod_base = OTHER; note = 2'O-methyl adenosine
  modified_base 5: mod_base = OTHER; note = 2'O-methyl cytidine
  modified_base 6: mod_base = OTHER; note = 2'-fluoro uridine
  modified_base 7: mod_base = OTHER; note = 2'O-methyl uridine
  modified_base 8: mod_base = OTHER; note = 2'O-methyl uridine
  modified_base 9: mod_base = OTHER; note = 2'O-methyl adenosine
  modified_base 10: mod_base = OTHER; note = 2'O-methyl guanosine
  modified_base 11: mod_base = OTHER; note = 2'O-methyl guanosine
  modified_base 12: mod_base = OTHER; note = 2'O-methyl guanosine
  modified_base 13: mod_base = OTHER; note = 2'O-methyl cytidine
  modified_base 14: mod_base = OTHER; note = 2'-fluoro adenosine
  modified_base 15: mod_base = OTHER; note = 2'O-methyl guanosine
  modified_base 16: mod_base = OTHER; note = 2'-fluoro adenosine
  modified_base 17: mod_base = OTHER; note = 2'O-methyl uridine
  modified_base 18: mod_base = OTHER; note = 2'O-methyl guanosine
  modified_base 19: mod_base = OTHER; note = 2'O-methyl uridine phosphorothioate
  modified_base 20: mod_base = OTHER; note = 2'O-methyl cytidine phosphorothioate
  modified_base 21: mod_base = OTHER; note = 2'O-methyl guanosine
ttgactttagggcagatgtcg

SEQ ID NO: 2345 - RNA, 21 nt, synthetic construct
  source 1..21: mol_type = other RNA
  modified_base 1: mod_base = OTHER; note = 5' vinyl phosphonate 2'O-methyl uridine phosphorothioate
  modified_base 2: mod_base = OTHER; note = 2'-fluoro uridine phosphorothioate
  modified_base 3: mod_base = OTHER; note = 2'O-methyl guanosine
  modified_base 4: mod_base = OTHER; note = 2'O-methyl adenosine
  modified_base 5: mod_base = OTHER; note = 2'O-methyl cytidine
  modified_base 6: mod_base = OTHER; note = 2'-fluoro uridine
  modified_base 7: mod_base = OTHER; note = 2'O-methyl uridine
  modified_base 8: mod_base = OTHER; note = 2'O-methyl uridine
  modified_base 9: mod_base = OTHER; note = 2'O-methyl adenosine
  modified_base 10: mod_base = OTHER; note = 2'O-methyl guanosine
  modified_base 11: mod_base = OTHER; note = 2'O-methyl guanosine
  modified_base 12: mod_base = OTHER; note = 2'O-methyl guanosine
  modified_base 13: mod_base = OTHER; note = 2'O-methyl cytidine
  modified_base 14: mod_base = OTHER; note = 2'-fluoro adenosine
  modified_base 15: mod_base = OTHER; note = 2'O-methyl guanosine
  modified_base 16: mod_base = OTHER; note = 2'-fluoro adenosine
  modified_base 17: mod_base = OTHER; note = 2'O-methyl uridine
  modified_base 18: mod_base = OTHER; note = 2'O-methyl guanosine
  modified_base 19: mod_base = OTHER; note = 2'O-methyl uridine phosphorothioate
  modified_base 20: mod_base = OTHER; note = 2'O-methyl cytidine phosphorothioate
  modified_base 21: mod_base = OTHER; note = 2'O-methyl guanosine
ttgactttagggcagatgtcg

SEQ ID NO: 2346 - RNA, 21 nt, synthetic construct
  source 1..21: mol_type = other RNA
  modified_base 1: mod_base = OTHER; note = 2'O-methyl uridine phosphorothioate
  modified_base 2: mod_base = OTHER; note = 2'-fluoro uridine phosphorothioate
  modified_base 3: mod_base = OTHER; note = 2'O-methyl guanosine
  modified_base 4: mod_base = OTHER; note = 2'O-methyl adenosine
  modified_base 5: mod_base = OTHER; note = 2'O-methyl cytidine
  modified_base 6: mod_base = OTHER; note = 2'-fluoro uridine
  modified_base 7: mod_base = OTHER; note = 2'O-methyl uridine
  modified_base 8: mod_base = OTHER; note = 2'O-methyl uridine
  modified_base 9: mod_base = OTHER; note = 2'O-methyl adenosine
  modified_base 10: mod_base = OTHER; note = 2'O-methyl guanosine
  modified_base 11: mod_base = OTHER; note = 2'O-methyl guanosine
  modified_base 12: mod_base = OTHER; note = 2'O-methyl guanosine
  modified_base 13: mod_base = OTHER; note = 2'O-methyl cytidine
  modified_base 14: mod_base = OTHER; note = 2'-fluoro adenosine
  modified_base 15: mod_base = OTHER; note = 2'O-methyl guanosine
  modified_base 16: mod_base = OTHER; note = 2'-fluoro adenosine
  modified_base 17: mod_base = OTHER; note = 2'O-methyl uridine
  modified_base 18: mod_base = OTHER; note = 2'O-methyl guanosine
  modified_base 19: mod_base = OTHER; note = 2'O-methyl uridine phosphorothioate
  modified_base 20: mod_base = OTHER; note = 2'O-methyl cytidine phosphorothioate
  modified_base 21: mod_base = OTHER; note = 2'O-methyl guanosine
ttgactttagggcagatgtcg

SEQ ID NO: 2347 - RNA, 21 nt, synthetic construct
  source 1..21: mol_type = other RNA
  modified_base 1: mod_base = OTHER; note = 5' vinyl phosphonate 2'O-methyl uridine phosphorothioate
  modified_base 2: mod_base = OTHER; note = 2'-fluoro uridine phosphorothioate
  modified_base 3: mod_base = OTHER; note = 2'O-methyl guanosine
  modified_base 4: mod_base = OTHER; note = 2'O-methyl adenosine
  modified_base 5: mod_base = OTHER; note = 2'O-methyl cytidine
  modified_base 6: mod_base = OTHER; note = 2'-fluoro uridine
  modified_base 7: mod_base = OTHER; note = 2'O-methyl uridine
  modified_base 8: mod_base = OTHER; note = 2'O-methyl uridine
  modified_base 9: mod_base = OTHER; note = 2'O-methyl adenosine
  modified_base 10: mod_base = OTHER; note = 2'O-methyl guanosine
  modified_base 11: mod_base = OTHER; note = 2'O-methyl guanosine
  modified_base 12: mod_base = OTHER; note = 2'O-methyl guanosine
  modified_base 13: mod_base = OTHER; note = 2'O-methyl cytidine
  modified_base 14: mod_base = OTHER; note = 2'-fluoro adenosine
  modified_base 15: mod_base = OTHER; note = 2'O-methyl guanosine
  modified_base 16: mod_base = OTHER; note = 2'-fluoro adenosine
  modified_base 17: mod_base = OTHER; note = 2'O-methyl uridine
  modified_base 18: mod_base = OTHER; note = 2'O-methyl guanosine
  modified_base 19: mod_base = OTHER; note = 2'O-methyl uridine phosphorothioate
  modified_base 20: mod_base = OTHER; note = 2'O-methyl cytidine phosphorothioate
  modified_base 21: mod_base = OTHER; note = 2'O-methyl guanosine
ttgactttagggcagatgtcg

SEQ ID NO: 2348 - RNA, 21 nt, synthetic construct
  source 1..21: mol_type = other RNA
  modified_base 1: mod_base = OTHER; note = 2'O-methyl adenosine phosphorothioate
  modified_base 2: mod_base = OTHER; note = 2'-fluoro adenosine phosphorothioate
  modified_base 3: mod_base = OTHER; note = 2'O-methyl uridine
  modified_base 4: mod_base = OTHER; note = 2'O-methyl guanosine
  modified_base 5: mod_base = OTHER; note = 2'O-methyl guanosine
  modified_base 6: mod_base = OTHER; note = 2'-fluoro cytidine
  modified_base 7: mod_base = OTHER; note = 2'O-methyl adenosine
  modified_base 8: mod_base = OTHER; note = 2'O-methyl guanosine
  modified_base 9: mod_base = OTHER; note = 2'O-methyl adenosine
  modified_base 10: mod_base = OTHER; note = 2'O-methyl uridine
  modified_base 11: mod_base = OTHER; note = 2'O-methyl uridine
  modified_base 12: mod_base = OTHER; note = 2'O-methyl cytidine
  modified_base 13: mod_base = OTHER; note = 2'O-methyl cytidine
  modified_base 14: mod_base = OTHER; note = 2'-fluoro adenosine
  modified_base 15: mod_base = OTHER; note = 2'O-methyl cytidine
  modified_base 16: mod_base = OTHER; note = 2'-fluoro adenosine
  modified_base 17: mod_base = OTHER; note = 2'O-methyl guanosine
  modified_base 18: mod_base = OTHER; note = 2'O-methyl guanosine
  modified_base 19: mod_base = OTHER; note = 2'O-methyl cytidine phosphorothioate
  modified_base 20: mod_base = OTHER; note = 2'O-methyl adenosine phosphorothioate
  modified_base 21: mod_base = OTHER; note = 2'O-methyl guanosine
aatggcagattccacaggcag

SEQ ID NO: 2349 - RNA, 21 nt, synthetic construct
  source 1..21: mol_type = other RNA
  modified_base 1: mod_base = OTHER; note = 5' vinyl phosphonate 2'O-methyl adenosine phosphorothioate
  modified_base 2: mod_base = OTHER; note = 2'-fluoro adenosine phosphorothioate
  modified_base 3: mod_base = OTHER; note = 2'O-methyl uridine
  modified_base 4: mod_base = OTHER; note = 2'O-methyl guanosine
  modified_base 5: mod_base = OTHER; note = 2'O-methyl guanosine
  modified_base 6: mod_base = OTHER; note = 2'-fluoro cytidine
  modified_base 7: mod_base = OTHER; note = 2'O-methyl adenosine
  modified_base 8: mod_base = OTHER; note = 2'O-methyl guanosine
  modified_base 9: mod_base = OTHER; note = 2'O-methyl adenosine
  modified_base 10: mod_base = OTHER; note = 2'O-methyl uridine
  modified_base 11: mod_base = OTHER; note = 2'O-methyl uridine
  modified_base 12: mod_base = OTHER; note = 2'O-methyl cytidine
  modified_base 13: mod_base = OTHER; note = 2'O-methyl cytidine
  modified_base 14: mod_base = OTHER; note = 2'-fluoro adenosine
  modified_base 15: mod_base = OTHER; note = 2'O-methyl cytidine
  modified_base 16: mod_base = OTHER; note = 2'-fluoro adenosine
  modified_base 17: mod_base = OTHER; note = 2'O-methyl guanosine
  modified_base 18: mod_base = OTHER; note = 2'O-methyl guanosine
  modified_base 19: mod_base = OTHER; note = 2'O-methyl cytidine phosphorothioate
  modified_base 20: mod_base = OTHER; note = 2'O-methyl adenosine phosphorothioate
  modified_base 21: mod_base = OTHER; note = 2'O-methyl guanosine
aatggcagattccacaggcag

SEQ ID NO: 2350 - RNA, 21 nt, synthetic construct
  source 1..21: mol_type = other RNA
  modified_base 1: mod_base = OTHER; note = 2'O-methyl uridine phosphorothioate
  modified_base 2: mod_base = OTHER; note = 2'-fluoro adenosine phosphorothioate
  modified_base 3: mod_base = OTHER; note = 2'O-methyl uridine
  modified_base 4: mod_base = OTHER; note = 2'O-methyl guanosine
  modified_base 5: mod_base = OTHER; note = 2'O-methyl guanosine
  modified_base 6: mod_base = OTHER; note = 2'-fluoro cytidine
  modified_base 7: mod_base = OTHER; note = 2'O-methyl adenosine
  modified_base 8: mod_base = OTHER; note = 2'O-methyl guanosine
  modified_base 9: mod_base = OTHER; note = 2'O-methyl adenosine
  modified_base 10: mod_base = OTHER; note = 2'O-methyl uridine
  modified_base 11: mod_base = OTHER; note = 2'O-methyl uridine
  modified_base 12: mod_base = OTHER; note = 2'O-methyl cytidine
  modified_base 13: mod_base = OTHER; note = 2'O-methyl cytidine
  modified_base 14: mod_base = OTHER; note = 2'-fluoro adenosine
  modified_base 15: mod_base = OTHER; note = 2'O-methyl cytidine
  modified_base 16: mod_base = OTHER; note = 2'-fluoro adenosine
  modified_base 17: mod_base = OTHER; note = 2'O-methyl guanosine
  modified_base 18: mod_base = OTHER; note = 2'O-methyl guanosine
  modified_base 19: mod_base = OTHER; note = 2'O-methyl cytidine phosphorothioate
  modified_base 20: mod_base = OTHER; note = 2'O-methyl adenosine phosphorothioate
  modified_base 21: mod_base = OTHER; note = 2'O-methyl guanosine
tatggcagattccacaggcag

SEQ ID NO: 2351 - RNA, 21 nt, synthetic construct
  source 1..21: mol_type = other RNA
  modified_base 1: mod_base = OTHER; note = 5' vinyl phosphonate 2'O-methyl uridine phosphorothioate
  modified_base 2: mod_base = OTHER; note = 2'-fluoro adenosine phosphorothioate
  modified_base 3: mod_base = OTHER; note = 2'O-methyl uridine
  modified_base 4: mod_base = OTHER; note = 2'O-methyl guanosine
  modified_base 5: mod_base = OTHER; note = 2'O-methyl guanosine
  modified_base 6: mod_base = OTHER; note = 2'-fluoro cytidine
  modified_base 7: mod_base = OTHER; note = 2'O-methyl adenosine
  modified_base 8: mod_base = OTHER; note = 2'O-methyl guanosine
  modified_base 9: mod_base = OTHER; note = 2'O-methyl adenosine
  modified_base 10: mod_base = OTHER; note = 2'O-methyl uridine
  modified_base 11: mod_base = OTHER; note = 2'O-methyl uridine
  modified_base 12: mod_base = OTHER; note = 2'O-methyl cytidine
  modified_base 13: mod_base = OTHER; note = 2'O-methyl cytidine
  modified_base 14: mod_base = OTHER; note = 2'-fluoro adenosine
  modified_base 15: mod_base = OTHER; note = 2'O-methyl cytidine
  modified_base 16: mod_base = OTHER; note = 2'-fluoro adenosine
  modified_base 17: mod_base = OTHER; note = 2'O-methyl guanosine
  modified_base 18: mod_base = OTHER; note = 2'O-methyl guanosine
  modified_base 19: mod_base = OTHER; note = 2'O-methyl cytidine phosphorothioate
  modified_base 20: mod_base = OTHER; note = 2'O-methyl adenosine phosphorothioate
  modified_base 21: mod_base = OTHER; note = 2'O-methyl guanosine
tatggcagattccacaggcag

SEQ ID NO: 2352 - RNA, 23 nt, synthetic construct
  source 1..23: mol_type = other RNA
  modified_base 1: mod_base = OTHER; note = 5' vinyl phosphonate 2'O-methyl uridine phosphorothioate
  modified_base 2: mod_base = OTHER; note = 2'-fluoro cytidine phosphorothioate
  modified_base 3: mod_base = OTHER; note = 2'O-methyl cytidine
  modified_base 4: mod_base = OTHER; note = 2'O-methyl cytidine
  modified_base 5: mod_base = OTHER; note = 2'O-methyl cytidine
  modified_base 6: mod_base = OTHER; note = 2'-fluoro adenosine
  modified_base 7: mod_base = OTHER; note = 2'O-methyl uridine
  modified_base 8: mod_base = OTHER; note = 2'O-methyl cytidine
  modified_base 9: mod_base = OTHER; note = 2'O-methyl adenosine
  modified_base 10: mod_base = OTHER; note = 2'O-methyl guanosine
  modified_base 11: mod_base = OTHER; note = 2'O-methyl adenosine
  modified_base 12: mod_base = OTHER; note = 2'O-methyl cytidine
  modified_base 13: mod_base = OTHER; note = 2'O-methyl adenosine
  modified_base 14: mod_base = OTHER; note = 2'-fluoro cytidine
  modified_base 15: mod_base = OTHER; note = 2'O-methyl uridine
  modified_base 16: mod_base = OTHER; note = 2'-fluoro cytidine
  modified_base 17: mod_base = OTHER; note = 2'O-methyl uridine
  modified_base 18: mod_base = OTHER; note = 2'O-methyl guanosine
  modified_base 19: mod_base = OTHER; note = 2'O-methyl guanosine
  modified_base 20: mod_base = OTHER; note = 2'O-methyl uridine
  modified_base 21: mod_base = OTHER; note = 2'O-methyl adenosine phosphorothioate
  modified_base 22: mod_base = OTHER; note = 2'O-methyl adenosine phosphorothioate
  modified_base 23: mod_base = OTHER; note = 2'O-methyl guanosine
tccccatcagacactctggtaag

SEQ ID NO: 2353 - RNA, 23 nt, synthetic construct
  source 1..23: mol_type = other RNA
  modified_base 1: mod_base = OTHER; note = 5' vinyl phosphonate 2'O-methyl uridine phosphorothioate
  modified_base 2: mod_base = OTHER; note = 2'-fluoro uridine phosphorothioate
  modified_base 3: mod_base = OTHER; note = 2'O-methyl guanosine
  modified_base 4: mod_base = OTHER; note = 2'O-methyl adenosine
  modified_base 5: mod_base = OTHER; note = 2'O-methyl cytidine
  modified_base 6: mod_base = OTHER; note = 2'-fluoro uridine
  modified_base 7: mod_base = OTHER; note = 2'O-methyl uridine
  modified_base 8: mod_base = OTHER; note = 2'O-methyl uridine
  modified_base 9: mod_base = OTHER; note = 2'O-methyl adenosine
  modified_base 10: mod_base = OTHER; note = 2'O-methyl guanosine
  modified_base 11: mod_base = OTHER; note = 2'O-methyl guanosine
  modified_base 12: mod_base = OTHER; note = 2'O-methyl guanosine
  modified_base 13: mod_base = OTHER; note = 2'O-methyl cytidine
  modified_base 14: mod_base = OTHER; note = 2'-fluoro adenosine
  modified_base 15: mod_base = OTHER; note = 2'O-methyl guanosine
  modified_base 16: mod_base = OTHER; note = 2'-fluoro adenosine
  modified_base 17: mod_base = OTHER; note = 2'O-methyl uridine
  modified_base 18: mod_base = OTHER; note = 2'O-methyl guanosine
  modified_base 19: mod_base = OTHER; note = 2'O-methyl uridine
  modified_base 20: mod_base = OTHER; note = 2'O-methyl cytidine
  modified_base 21: mod_base = OTHER; note = 2'O-methyl guanosine phosphorothioate
  modified_base 22: mod_base = OTHER; note = 2'O-methyl uridine phosphorothioate
  modified_base 23: mod_base = OTHER; note = 2'O-methyl adenosine
ttgactttagggcagatgtcgta

SEQ ID NO: 2354 - RNA, 19 nt, synthetic construct
  source 1..19: mol_type = other RNA
  modified_base 1: mod_base = OTHER; note = 2'O-methyl cytidine phosphorothioate
  modified_base 2: mod_base = OTHER; note = 2'O-methyl guanosine phosphorothioate
  modified_base 3: mod_base = OTHER; note = 2'O-methyl uridine
  modified_base 4: mod_base = OTHER; note = 2'O-methyl uridine
  modified_base 5: mod_base = OTHER; note = 2'-fluoro cytidine
  modified_base 6: mod_base = OTHER; note = 2'O-methyl uridine
  modified_base 7: mod_base = OTHER; note = 2'-fluoro guanosine
  modified_base 8: mod_base = OTHER; note = 2'-fluoro guanosine
  modified_base 9: mod_base = OTHER; note = 2'-fluoro uridine
  modified_base 10: mod_base = OTHER; note = 2'O-methyl guanosine
  modified_base 11: mod_base = OTHER; note = 2'O-methyl uridine
  modified_base 12: mod_base = OTHER; note = 2'O-methyl cytidine
  modified_base 13: mod_base = OTHER; note = 2'O-methyl uridine
  modified_base 14: mod_base = OTHER; note = 2'O-methyl guanosine
  modified_base 15: mod_base = OTHER; note = 2'O-methyl adenosine
  modified_base 16: mod_base = OTHER; note = 2'O-methyl cytidine
  modified_base 17: mod_base = OTHER; note = 2'O-methyl uridine
  modified_base 18: mod_base = OTHER; note = 2'O-methyl uridine
  modified_base 19: mod_base = OTHER; note = 2'O-methyl uridine 6-(5-(((2R,3R,4R,5R,6R)-3-acetamido-4,5-dihydroxy-6-(hydrox ymethyl)tetrahydro-2H-pyran-2-yl)oxy)pentanamido)-N-(6-(4-( hydroxymethyl)-4-(methoxymethyl)piperidin-1-yl)-6-oxohexyl) hexanamide-phosphorothioate-6-(5-(((2R,3R,4R,5R,6R)-3-aceta mido-4,5-dihydroxy-6-(hydroxymethyl)tetrahydro-2H-pyran-2-y l)oxy)pentanamido)-N-(6-(4-(hydroxymethyl)-4-(methoxymethyl )piperidin-1-yl)-6-oxohexyl)hexanamide-phosphorothioate-6-( 5-(((2R,3R,4R,5R,6R)-3-acetamido-4,5-dihydroxy-6-(hydroxyme thyl)tetrahydro-2H-pyran-2-yl)oxy)pentanamido)-N-(6-(4-(hyd roxymethyl)-4-(methoxymethyl)piperidin-1-yl)-6-oxohexyl)hex anamide
cgttctggtgtctgacttt

SEQ ID NO: 2355 - RNA, 21 nt, synthetic construct
  source 1..21: mol_type = other RNA
  modified_base 1: mod_base = OTHER; note = 2'O-methyl guanosine phosphorothioate
  modified_base 2: mod_base = OTHER; note = 2'O-methyl cytidine phosphorothioate
  modified_base 3: mod_base = OTHER; note = 2'O-methyl cytidine
  modified_base 4: mod_base = OTHER; note = 2'O-methyl uridine
  modified_base 5: mod_base = OTHER; note = 2'O-methyl uridine
  modified_base 6: mod_base = OTHER; note = 2'O-methyl guanosine
  modified_base 7: mod_base = OTHER; note = 2'-fluoro guanosine
  modified_base 8: mod_base = OTHER; note = 2'O-methyl uridine
  modified_base 9: mod_base = OTHER; note = 2'-fluoro adenosine
  modified_base 10: mod_base = OTHER; note = 2'-fluoro uridine
  modified_base 11: mod_base = OTHER; note = 2'-fluoro guanosine
  modified_base 12: mod_base = OTHER; note = 2'O-methyl uridine
  modified_base 13: mod_base = OTHER; note = 2'O-methyl uridine
  modified_base 14: mod_base = OTHER; note = 2'O-methyl cytidine
  modified_base 15: mod_base = OTHER; note = 2'O-methyl cytidine
  modified_base 16: mod_base = OTHER; note = 2'O-methyl uridine
  modified_base 17: mod_base = OTHER; note = 2'O-methyl guanosine
  modified_base 18: mod_base = OTHER; note = 2'O-methyl cytidine
  modified_base 19: mod_base = OTHER; note = 2'O-methyl uridine
  modified_base 20: mod_base = OTHER; note = 2'O-methyl uridine
  modified_base 21: mod_base = OTHER; note = 2'O-methyl cytidine 6-(5-(((2R,3R,4R,5R,6R)-3-acetamido-4,5-dihydroxy-6-(hydrox ymethyl)tetrahydro-2H-pyran-2-yl)oxy)pentanamido)-N-(6-(4-( hydroxymethyl)-4-(methoxymethyl)piperidin-1-yl)-6-oxohexyl) hexanamide-phosphorothioate-6-(5-(((2R,3R,4R,5R,6R)-3-aceta mido-4,5-dihydroxy-6-(hydroxymethyl)tetrahydro-2H-pyran-2-y l)oxy)pentanamido)-N-(6-(4-(hydroxymethyl)-4-(methoxymethyl )piperidin-1-yl)-6-oxohexyl)hexanamide-phosphorothioate-6-( 5-(((2R,3R,4R,5R,6R)-3-acetamido-4,5-dihydroxy-6-(hydroxyme thyl)tetrahydro-2H-pyran-2-yl)oxy)pentanamido)-N-(6-(4-(hyd roxymethyl)-4-(methoxymethyl)piperidin-1-yl)-6-oxohexyl)hex anamide
gccttggtatgttcctgcttc

SEQ ID NO: 2356 - RNA, 21 nt, synthetic construct
  source 1..21: mol_type = other RNA
  modified_base 1: mod_base = OTHER; note = 2'O-methyl guanosine phosphorothioate
  modified_base 2: mod_base = OTHER; note = 2'O-methyl cytidine phosphorothioate
  modified_base 3: mod_base = OTHER; note = 2'O-methyl cytidine
  modified_base 4: mod_base = OTHER; note = 2'O-methyl uridine
  modified_base 5: mod_base = OTHER; note = 2'-fluoro uridine
  modified_base 6: mod_base = OTHER; note = 2'O-methyl guanosine
  modified_base 7: mod_base = OTHER; note = 2'O-methyl guanosine
  modified_base 8: mod_base = OTHER; note = 2'O-methyl uridine
  modified_base 9: mod_base = OTHER; note = 2'-fluoro adenosine
  modified_base 10: mod_base = OTHER; note = 2'-fluoro uridine
  modified_base 11: mod_base = OTHER; note = 2'-fluoro guanosine
  modified_base 12: mod_base = OTHER; note = 2'O-methyl uridine
  modified_base 13: mod_base = OTHER; note = 2'O-methyl uridine
  modified_base 14: mod_base = OTHER; note = 2'-fluoro cytidine
  modified_base 15: mod_base = OTHER; note = 2'O-methyl cytidine
  modified_base 16: mod_base = OTHER; note = 2'O-methyl uridine
  modified_base 17: mod_base = OTHER; note = 2'O-methyl guanosine
  modified_base 18: mod_base = OTHER; note = 2'O-methyl cytidine
  modified_base 19: mod_base = OTHER; note = 2'-fluoro uridine
  modified_base 20: mod_base = OTHER; note = 2'O-methyl uridine
  modified_base 21: mod_base = OTHER; note = 2'O-methyl cytidine 6-(5-(((2R,3R,4R,5R,6R)-3-acetamido-4,5-dihydroxy-6-(hydrox ymethyl)tetrahydro-2H-pyran-2-yl)oxy)pentanamido)-N-(6-(4-( hydroxymethyl)-4-(methoxymethyl)piperidin-1-yl)-6-oxohexyl) hexanamide-phosphorothioate-6-(5-(((2R,3R,4R,5R,6R)-3-aceta mido-4,5-dihydroxy-6-(hydroxymethyl)tetrahydro-2H-pyran-2-y l)oxy)pentanamido)-N-(6-(4-(hydroxymethyl)-4-(methoxymethyl )piperidin-1-yl)-6-oxohexyl)hexanamide-phosphorothioate-6-( 5-(((2R,3R,4R,5R,6R)-3-acetamido-4,5-dihydroxy-6-(hydroxyme thyl)tetrahydro-2H-pyran-2-yl)oxy)pentanamido)-N-(6-(4-(hyd roxymethyl)-4-(methoxymethyl)piperidin-1-yl)-6-oxohexyl)hex anamide
gccttggtatgttcctgcttc

SEQ ID NO: 2357 - RNA, 21 nt, synthetic construct
  source 1..21: mol_type = other RNA
  modified_base 1: mod_base = OTHER; note = 2'O-methyl guanosine phosphorothioate
  modified_base 2: mod_base = OTHER; note = 2'O-methyl uridine phosphorothioate
  modified_base 3: mod_base = OTHER; note = 2'O-methyl cytidine
  modified_base 4: mod_base = OTHER; note = 2'O-methyl guanosine
  modified_base 5: mod_base = OTHER; note = 2'-fluoro uridine
  modified_base 6: mod_base = OTHER; note = 2'O-methyl guanosine
  modified_base 7: mod_base = OTHER; note = 2'O-methyl guanosine
  modified_base 8: mod_base = OTHER; note = 2'O-methyl adenosine
  modified_base 9: mod_base = OTHER; note = 2'-fluoro uridine
  modified_base 10: mod_base = OTHER; note = 2'-fluoro guanosine
  modified_base 11: mod_base = OTHER; note = 2'-fluoro cytidine
  modified_base 12: mod_base = OTHER; note = 2'O-methyl cytidine
  modified_base 13: mod_base = OTHER; note = 2'O-methyl uridine
  modified_base 14: mod_base = OTHER; note = 2'-fluoro uridine
  modified_base 15: mod_base = OTHER; note = 2'O-methyl guanosine
  modified_base 16: mod_base = OTHER; note = 2'O-methyl guanosine
  modified_base 17: mod_base = OTHER; note = 2'O-methyl uridine
  modified_base 18: mod_base = OTHER; note = 2'O-methyl adenosine
  modified_base 19: mod_base = OTHER; note = 2'-fluoro uridine
  modified_base 20: mod_base = OTHER; note = 2'O-methyl guanosine
  modified_base 21: mod_base = OTHER; note = 2'O-methyl uridine 6-(5-(((2R,3R,4R,5R,6R)-3-acetamido-4,5-dihydroxy-6-(hydrox ymethyl)tetrahydro-2H-pyran-2-yl)oxy)pentanamido)-N-(6-(4-( hydroxymethyl)-4-(methoxymethyl)piperidin-1-yl)-6-oxohexyl) hexanamide-phosphorothioate-6-(5-(((2R,3R,4R,5R,6R)-3-aceta mido-4,5-dihydroxy-6-(hydroxymethyl)tetrahydro-2H-pyran-2-y l)oxy)pentanamido)-N-(6-(4-(hydroxymethyl)-4-(methoxymethyl )piperidin-1-yl)-6-oxohexyl)hexanamide-phosphorothioate-6-( 5-(((2R,3R,4R,5R,6R)-3-acetamido-4,5-dihydroxy-6-(hydroxyme thyl)tetrahydro-2H-pyran-2-yl)oxy)pentanamido)-N-(6-(4-(hyd roxymethyl)-4-(methoxymethyl)piperidin-1-yl)-6-oxohexyl)hex anamide
gtcgtggatgccttggtatgt

SEQ ID NO: 2358 - RNA, 21 nt, synthetic construct
  source 1..21: mol_type = other RNA
  modified_base 1: mod_base = OTHER; note = 2'O-methyl adenosine phosphorothioate
  modified_base 2: mod_base = OTHER; note = 2'O-methyl uridine phosphorothioate
  modified_base 3: mod_base = OTHER; note = 2'O-methyl guanosine
  modified_base 4: mod_base = OTHER; note = 2'O-methyl cytidine
  modified_base 5: mod_base = OTHER; note = 2'-fluoro cytidine
  modified_base 6: mod_base = OTHER; note = 2'O-methyl adenosine
  modified_base 7: mod_base = OTHER; note = 2'O-methyl adenosine
  modified_base 8: mod_base = OTHER; note = 2'O-methyl adenosine
  modified_base 9: mod_base = OTHER; note = 2'-fluoro adenosine
  modified_base 10: mod_base = OTHER; note = 2'-fluoro cytidine
  modified_base 11: mod_base = OTHER; note = 2'-fluoro adenosine
  modified_base 12: mod_base = OTHER; note = 2'O-methyl adenosine
  modified_base 13: mod_base = OTHER; note = 2'O-methyl cytidine
  modified_base 14: mod_base = OTHER; note = 2'-fluoro cytidine
  modified_base 15: mod_base = OTHER; note = 2'O-methyl adenosine
  modified_base 16: mod_base = OTHER; note = 2'O-methyl uridine
  modified_base 17: mod_base = OTHER; note = 2'O-methyl cytidine
  modified_base 18: mod_base = OTHER; note = 2'O-methyl adenosine
  modified_base 19: mod_base = OTHER; note = 2'-fluoro cytidine
  modified_base 20: mod_base = OTHER; note = 2'O-methyl cytidine
  modified_base 21: mod_base = OTHER; note = 2'O-methyl guanosine 6-(5-(((2R,3R,4R,5R,6R)-3-acetamido-4,5-dihydroxy-6-(hydrox ymethyl)tetrahydro-2H-pyran-2-yl)oxy)pentanamido)-N-(6-(4-( hydroxymethyl)-4-(methoxymethyl)piperidin-1-yl)-6-oxohexyl) hexanamide-phosphorothioate-6-(5-(((2R,3R,4R,5R,6R)-3-aceta mido-4,5-dihydroxy-6-(hydroxymethyl)tetrahydro-2H-pyran-2-y l)oxy)pentanamido)-N-(6-(4-(hydroxymethyl)-4-(methoxymethyl )piperidin-1-yl)-6-oxohexyl)hexanamide-phosphorothioate-6-( 5-(((2R,3R,4R,5R,6R)-3-acetamido-4,5-dihydroxy-6-(hydroxyme thyl)tetrahydro-2H-pyran-2-yl)oxy)pentanamido)-N-(6-(4-(hyd roxymethyl)-4-(methoxymethyl)piperidin-1-yl)-6-oxohexyl)hex anamide
atgccaaaacaaccatcaccg

SEQ ID NO: 2359 - RNA, 21 nt, synthetic construct
  source 1..21: mol_type = other RNA
  modified_base 1: mod_base = OTHER; note = 2'O-methyl cytidine phosphorothioate
  modified_base 2: mod_base = OTHER; note = 2'-fluoro adenosine phosphorothioate
  modified_base 3: mod_base = OTHER; note = 2'O-methyl guanosine
  modified_base 4: mod_base = OTHER; note = 2'O-methyl guanosine
  modified_base 5: mod_base = OTHER; note = 2'O-methyl adenosine
  modified_base 6: mod_base = OTHER; note = 2'-fluoro adenosine
  modified_base 7: mod_base = OTHER; note = 2'O-methyl cytidine
  modified_base 8: mod_base = OTHER; note = 2'O-methyl adenosine
  modified_base 9: mod_base = OTHER; note = 2'O-methyl uridine
  modified_base 10: mod_base = OTHER; note = 2'O-methyl adenosine
  modified_base 11: mod_base = OTHER; note = 2'O-methyl cytidine
  modified_base 12: mod_base = OTHER; note = 2'O-methyl cytidine
  modified_base 13: mod_base = OTHER; note = 2'O-methyl adenosine
  modified_base 14: mod_base = OTHER; note = 2'-fluoro adenosine
  modified_base 15: mod_base = OTHER; note = 2'O-methyl guanosine
  modified_base 16: mod_base = OTHER; note = 2'-fluoro guanosine
  modified_base 17: mod_base = OTHER; note = 2'O-methyl cytidine
  modified_base 18: mod_base = OTHER; note = 2'O-methyl adenosine
  modified_base 19: mod_base = OTHER; note = 2'O-methyl uridine phosphorothioate
  modified_base 20: mod_base = OTHER; note = 2'O-methyl cytidine phosphorothioate
  modified_base 21: mod_base = OTHER; note = 2'O-methyl cytidine
caggaacataccaaggcatcc

SEQ ID NO: 2360 - RNA, 21 nt, synthetic construct
  source 1..21: mol_type = other RNA
  modified_base 1: mod_base = OTHER; note = 2'O-methyl guanosine phosphorothioate
  modified_base 2: mod_base = OTHER; note = 2'O-methyl cytidine phosphorothioate
  modified_base 3: mod_base = OTHER; note = 2'O-methyl cytidine
  modified_base 4: mod_base = OTHER; note = 2'O-methyl uridine
  modified_base 5: mod_base = OTHER; note = 2'O-methyl uridine
  modified_base 6: mod_base = OTHER; note = 2'O-methyl guanosine
  modified_base 7: mod_base = OTHER; note = 2'-fluoro guanosine
  modified_base 8: mod_base = OTHER; note = 2'O-methyl uridine
  modified_base 9: mod_base = OTHER; note = 2'-fluoro adenosine
  modified_base 10: mod_base = OTHER; note = 2'-fluoro uridine
  modified_base 11: mod_base = OTHER; note = 2'-fluoro guanosine
  modified_base 12: mod_base = OTHER; note = 2'O-methyl uridine
  modified_base 13: mod_base = OTHER; note = 2'O-methyl uridine
  modified_base 14: mod_base = OTHER; note = 2'O-methyl cytidine
  modified_base 15: mod_base = OTHER; note = 2'O-methyl cytidine
  modified_base 16: mod_base = OTHER; note = 2'O-methyl uridine
  modified_base 17: mod_base = OTHER; note = 2'O-methyl guanosine
  modified_base 18: mod_base = OTHER; note = 2'O-methyl cytidine
  modified_base 19: mod_base = OTHER; note = 2'O-methyl uridine
  modified_base 20: mod_base = OTHER; note = 2'O-methyl uridine
  modified_base 21: mod_base = OTHER; note = 2'O-methyl cytidine 6-(5-(((2R,3R,4R,5R,6R)-3-acetamido-4,5-dihydroxy-6-(hydrox ymethyl)tetrahydro-2H-pyran-2-yl)oxy)pentanamido)-N-(6-(4-( hydroxymethyl)-4-(methoxymethyl)piperidin-1-yl)-6-oxohexyl) hexanamide-phosphorothioate-6-(5-(((2R,3R,4R,5R,6R)-3-aceta mido-4,5-dihydroxy-6-(hydroxymethyl)tetrahydro-2H-pyran-2-y l)oxy)pentanamido)-N-(6-(4-(hydroxymethyl)-4-(methoxymethyl )piperidin-1-yl)-6-oxohexyl)hexanamide-phosphorothioate-6-( 5-(((2R,3R,4R,5R,6R)-3-acetamido-4,5-dihydroxy-6-(hydroxyme thyl)tetrahydro-2H-pyran-2-yl)oxy)pentanamido)-N-(6-(4-(hyd roxymethyl)-4-(methoxymethyl)piperidin-1-yl)-6-oxohexyl)hex anamide
gccttggtatgttcctgcttc

SEQ ID NO: 2361 - RNA, 21 nt, synthetic construct
  source 1..21: mol_type = other RNA
  modified_base 1: mod_base = OTHER; note = 2'O-methyl guanosine phosphorothioate
  modified_base 2: mod_base = OTHER; note = 2'O-methyl cytidine phosphorothioate
  modified_base 3: mod_base = OTHER; note = 2'O-methyl cytidine
  modified_base 4: mod_base = OTHER; note = 2'O-methyl uridine
  modified_base 5: mod_base = OTHER; note = 2'-fluoro uridine
  modified_base 6: mod_base = OTHER; note = 2'O-methyl guanosine
  modified_base 7: mod_base = OTHER; note = 2'O-methyl guanosine
  modified_base 8: mod_base = OTHER; note = 2'O-methyl uridine
  modified_base 9: mod_base = OTHER; note = 2'-fluoro adenosine
  modified_base 10: mod_base = OTHER; note = 2'-fluoro uridine
  modified_base 11: mod_base = OTHER; note = 2'-fluoro guanosine
  modified_base 12: mod_base = OTHER; note = 2'O-methyl uridine
  modified_base 13: mod_base = OTHER; note = 2'O-methyl uridine
  modified_base 14: mod_base = OTHER; note = 2'-fluoro cytidine
  modified_base 15: mod_base = OTHER; note = 2'O-methyl cytidine
  modified_base 16: mod_base = OTHER; note = 2'O-methyl uridine
  modified_base 17: mod_base = OTHER; note = 2'O-methyl guanosine
  modified_base 18: mod_base = OTHER; note = 2'O-methyl cytidine
  modified_base 19: mod_base = OTHER; note = 2'-fluoro uridine
  modified_base 20: mod_base = OTHER; note = 2'O-methyl uridine
  modified_base 21: mod_base = OTHER; note = 2'O-methyl cytidine 6-(5-(((2R,3R,4R,5R,6R)-3-acetamido-4,5-dihydroxy-6-(hydrox ymethyl)tetrahydro-2H-pyran-2-yl)oxy)pentanamido)-N-(6-(4-( hydroxymethyl)-4-(methoxymethyl)piperidin-1-yl)-6-oxohexyl) hexanamide-phosphorothioate-6-(5-(((2R,3R,4R,5R,6R)-3-aceta mido-4,5-dihydroxy-6-(hydroxymethyl)tetrahydro-2H-pyran-2-y l)oxy)pentanamido)-N-(6-(4-(hydroxymethyl)-4-(methoxymethyl )piperidin-1-yl)-6-oxohexyl)hexanamide-phosphorothioate-6-( 5-(((2R,3R,4R,5R,6R)-3-acetamido-4,5-dihydroxy-6-(hydroxyme thyl)tetrahydro-2H-pyran-2-yl)oxy)pentanamido)-N-(6-(4-(hyd roxymethyl)-4-(methoxymethyl)piperidin-1-yl)-6-oxohexyl)hex anamide
gccttggtatgttcctgcttc

SEQ ID NO: 2362 - RNA, 21 nt, synthetic construct
  source 1..21: mol_type = other RNA
  modified_base 1: mod_base = OTHER; note = 2'O-methyl guanosine phosphorothioate
  modified_base 2: mod_base = OTHER; note = 2'O-methyl uridine phosphorothioate
  modified_base 3: mod_base = OTHER; note = 2'O-methyl cytidine
  modified_base 4: mod_base = OTHER; note = 2'O-methyl guanosine
  modified_base 5: mod_base = OTHER; note = 2'-fluoro uridine
  modified_base 6: mod_base = OTHER; note = 2'O-methyl guanosine
  modified_base 7: mod_base = OTHER; note = 2'O-methyl guanosine
  modified_base 8: mod_base = OTHER; note = 2'O-methyl adenosine
  modified_base 9: mod_base = OTHER; note = 2'-fluoro uridine
  modified_base 10: mod_base = OTHER; note = 2'-fluoro guanosine
  modified_base 11: mod_base = OTHER; note = 2'-fluoro cytidine
  modified_base 12: mod_base = OTHER; note = 2'O-methyl cytidine
  modified_base 13: mod_base = OTHER; note = 2'O-methyl uridine
  modified_base 14: mod_base = OTHER; note = 2'-fluoro uridine
  modified_base 15: mod_base = OTHER; note = 2'O-methyl guanosine
  modified_base 16: mod_base = OTHER; note = 2'O-methyl guanosine
  modified_base 17: mod_base = OTHER; note = 2'O-methyl uridine
  modified_base 18: mod_base = OTHER; note = 2'O-methyl adenosine
  modified_base 19: mod_base = OTHER; note = 2'-fluoro uridine
  modified_base 20: mod_base = OTHER; note = 2'O-methyl guanosine
  modified_base 21: mod_base = OTHER; note = 2'O-methyl uridine 6-(5-(((2R,3R,4R,5R,6R)-3-acetamido-4,5-dihydroxy-6-(hydrox ymethyl)tetrahydro-2H-pyran-2-yl)oxy)pentanamido)-N-(6-(4-( hydroxymethyl)-4-(methoxymethyl)piperidin-1-yl)-6-oxohexyl) hexanamide-phosphorothioate-6-(5-(((2R,3R,4R,5R,6R)-3-aceta mido-4,5-dihydroxy-6-(hydroxymethyl)tetrahydro-2H-pyran-2-y l)oxy)pentanamido)-N-(6-(4-(hydroxymethyl)-4-(methoxymethyl )piperidin-1-yl)-6-oxohexyl)hexanamide-phosphorothioate-6-( 5-(((2R,3R,4R,5R,6R)-3-acetamido-4,5-dihydroxy-6-(hydroxyme thyl)tetrahydro-2H-pyran-2-yl)oxy)pentanamido)-N-(6-(4-(hyd roxymethyl)-4-(methoxymethyl)piperidin-1-yl)-6-oxohexyl)hex anamide
gtcgtggatgccttggtatgt

SEQ ID NO: 2363 - RNA, 21 nt, synthetic construct
  source 1..21: mol_type = other RNA
  modified_base 1: mod_base = OTHER; note = 2'O-methyl adenosine phosphorothioate
  modified_base 2: mod_base = OTHER; note = 2'O-methyl uridine phosphorothioate
  modified_base 3: mod_base = OTHER; note = 2'O-methyl guanosine
  modified_base 4: mod_base = OTHER; note = 2'O-methyl cytidine
  modified_base 5: mod_base = OTHER; note = 2'-fluoro cytidine
  modified_base 6: mod_base = OTHER; note = 2'O-methyl adenosine
  modified_base 7: mod_base = OTHER; note = 2'O-methyl adenosine
  modified_base 8: mod_base = OTHER; note = 2'O-methyl adenosine
  modified_base 9: mod_base = OTHER; note = 2'-fluoro adenosine
  modified_base 10: mod_base = OTHER; note = 2'-fluoro cytidine
  modified_base 11: mod_base = OTHER; note = 2'-fluoro adenosine
  modified_base 12: mod_base = OTHER; note = 2'O-methyl adenosine
  modified_base 13: mod_base = OTHER; note = 2'O-methyl cytidine
  modified_base 14: mod_base = OTHER; note = 2'-fluoro cytidine
  modified_base 15: mod_base = OTHER; note = 2'O-methyl adenosine
  modified_base 16: mod_base = OTHER; note = 2'O-methyl uridine
  modified_base 17: mod_base = OTHER; note = 2'O-methyl cytidine
  modified_base 18: mod_base = OTHER; note = 2'O-methyl adenosine
  modified_base 19: mod_base = OTHER; note = 2'-fluoro cytidine
  modified_base 20: mod_base = OTHER; note = 2'O-methyl cytidine
  modified_base 21: mod_base = OTHER; note = 2'O-methyl guanosine 6-(5-(((2R,3R,4R,5R,6R)-3-acetamido-4,5-dihydroxy-6-(hydrox ymethyl)tetrahydro-2H-pyran-2-yl)oxy)pentanamido)-N-(6-(4-( hydroxymethyl)-4-(methoxymethyl)piperidin-1-yl)-6-oxohexyl) hexanamide-phosphorothioate-6-(5-(((2R,3R,4R,5R,6R)-3-aceta mido-4,5-dihydroxy-6-(hydroxymethyl)tetrahydro-2H-pyran-2-y l)oxy)pentanamido)-N-(6-(4-(hydroxymethyl)-4-(methoxymethyl )piperidin-1-yl)-6-oxohexyl)hexanamide-phosphorothioate-6-( 5-(((2R,3R,4R,5R,6R)-3-acetamido-4,5-dihydroxy-6-(hydroxyme thyl)tetrahydro-2H-pyran-2-yl)oxy)pentanamido)-N-(6-(4-(hyd roxymethyl)-4-(methoxymethyl)piperidin-1-yl)-6-oxohexyl)hex anamide
atgccaaaacaaccatcaccg

SEQ ID NO: 2364 - RNA, 21 nt, synthetic construct
  source 1..21: mol_type = other RNA
  modified_base 1: mod_base = OTHER; note = 2'O-methyl adenosine phosphorothioate
  modified_base 2: mod_base = OTHER; note = 2'-fluoro adenosine phosphorothioate
  modified_base 3: mod_base = OTHER; note = 2'O-methyl guanosine
  modified_base 4: mod_base = OTHER; note = 2'O-methyl guanosine
  modified_base 5: mod_base = OTHER; note = 2'O-methyl adenosine
  modified_base 6: mod_base = OTHER; note = 2'-fluoro adenosine
  modified_base 7: mod_base = OTHER; note = 2'O-methyl cytidine
  modified_base 8: mod_base = OTHER; note = 2'O-methyl adenosine
  modified_base 9: mod_base = OTHER; note = 2'O-methyl uridine
  modified_base 10: mod_base = OTHER; note = 2'O-methyl adenosine
  modified_base 11: mod_base = OTHER; note = 2'O-methyl cytidine
  modified_base 12: mod_base = OTHER; note = 2'O-methyl cytidine
  modified_base 13: mod_base = OTHER; note = 2'O-methyl adenosine
  modified_base 14: mod_base = OTHER; note = 2'-fluoro adenosine
  modified_base 15: mod_base = OTHER; note = 2'O-methyl guanosine
  modified_base 16: mod_base = OTHER; note = 2'-fluoro guanosine
  modified_base 17: mod_base = OTHER; note = 2'O-methyl cytidine
  modified_base 18: mod_base = OTHER; note = 2'O-methyl adenosine
  modified_base 19: mod_base = OTHER; note = 2'O-methyl uridine phosphorothioate
  modified_base 20: mod_base = OTHER; note = 2'O-methyl uridine phosphorothioate
  modified_base 21: mod_base = OTHER; note = 2'O-methyl uridine
aaggaacataccaaggcattt

SEQ ID NO: 2365 - RNA, 21 nt, synthetic construct
  source 1..21: mol_type = other RNA
  modified_base 1: mod_base = OTHER; note = 2'O-methyl uridine phosphorothioate
  modified_base 2: mod_base = OTHER; note = 2'-fluoro adenosine phosphorothioate
  modified_base 3: mod_base = OTHER; note = 2'O-methyl guanosine
  modified_base 4: mod_base = OTHER; note = 2'O-methyl guanosine
  modified_base 5: mod_base = OTHER; note = 2'O-methyl adenosine
  modified_base 6: mod_base = OTHER; note = 2'-fluoro adenosine
  modified_base 7: mod_base = OTHER; note = 2'O-methyl cytidine
  modified_base 8: mod_base = OTHER; note = 2'O-methyl adenosine
  modified_base 9: mod_base = OTHER; note = 2'O-methyl uridine
  modified_base 10: mod_base = OTHER; note = 2'O-methyl adenosine
  modified_base 11: mod_base = OTHER; note = 2'O-methyl cytidine
  modified_base 12: mod_base = OTHER; note = 2'O-methyl cytidine
  modified_base 13: mod_base = OTHER; note = 2'O-methyl adenosine
  modified_base 14: mod_base = OTHER; note = 2'-fluoro adenosine
  modified_base 15: mod_base = OTHER; note = 2'O-methyl guanosine
  modified_base 16: mod_base = OTHER; note = 2'-fluoro guanosine
  modified_base 17: mod_base = OTHER; note = 2'O-methyl cytidine
  modified_base 18: mod_base = OTHER; note = 2'O-methyl adenosine
  modified_base 19: mod_base = OTHER; note = 2'O-methyl uridine phosphorothioate
  modified_base 20: mod_base = OTHER; note = 2'O-methyl uridine phosphorothioate
  modified_base 21: mod_base = OTHER; note = 2'O-methyl uridine
taggaacataccaaggcattt

SEQ ID NO: 2366 - RNA, 21 nt, synthetic construct
  source 1..21: mol_type = other RNA
  modified_base 1: mod_base = OTHER; note = 5' vinyl phosphonate 2'O-methyl uridine phosphorothioate
  modified_base 2: mod_base = OTHER; note = 2'-fluoro adenosine phosphorothioate
  modified_base 3: mod_base = OTHER; note = 2'O-methyl guanosine
  modified_base 4: mod_base = OTHER; note = 2'O-methyl guanosine
  modified_base 5: mod_base = OTHER; note = 2'O-methyl adenosine
  modified_base 6: mod_base = OTHER; note = 2'-fluoro adenosine
  modified_base 7: mod_base = OTHER; note = 2'O-methyl cytidine
  modified_base 8: mod_base = OTHER; note = 2'O-methyl adenosine
  modified_base 9: mod_base = OTHER; note = 2'O-methyl uridine
  modified_base 10: mod_base = OTHER; note = 2'O-methyl adenosine
  modified_base 11: mod_base = OTHER; note = 2'O-methyl cytidine
  modified_base 12: mod_base = OTHER; note = 2'O-methyl cytidine
  modified_base 13: mod_base = OTHER; note = 2'O-methyl adenosine
  modified_base 14: mod_base = OTHER; note = 2'-fluoro adenosine
  modified_base 15: mod_base = OTHER; note = 2'O-methyl guanosine
  modified_base 16: mod_base = OTHER; note = 2'-fluoro guanosine
  modified_base 17: mod_base = OTHER; note = 2'O-methyl cytidine
  modified_base 18: mod_base = OTHER; note = 2'O-methyl adenosine
  modified_base 19: mod_base = OTHER; note = 2'O-methyl uridine phosphorothioate
  modified_base 20: mod_base = OTHER; note = 2'O-methyl uridine phosphorothioate
  modified_base 21: mod_base = OTHER; note = 2'O-methyl uridine
taggaacataccaaggcattt

What is claimed is:

1. A double-stranded short interfering RNA (siRNA) molecule comprising:
(a) a sense strand comprising a nucleotide sequence that is at least about 60%, 65%, 70%, 75%, 80%, 85%, 90%, 95%, or 100% identical to a nucleotide sequence of any one of SEQ ID NOs: 3-452, 903-1484, 2068-2107, 2148-2187, 2228-2252, 2278-2301, 2326-2339 or 2354-2358; and/or
(b) an antisense strand comprising a nucleotide sequence that is at least about 60%, 65%, 70%, 75%, 80%, 85%, 90%, 95%, or 100% identical to a nucleotide sequence of any one of SEQ ID NOs: 453-902, 1485-2066, 2108-2147, 2188-2227, 2253-2277, 2302-2325 or 2340-2353,
wherein the siRNA molecule downregulates expression of a Patatin-like phospholipase domain-containing protein 3 (PNPLA3) gene.

2. The siRNA molecule according to claim 1, wherein the sense strand comprises a nucleotide sequence of any one of SEQ ID NOs: 3-452, 903-1484, 2068-2107, 2148-2187, 2228-2252, 2278-2301, 2326-2339 or 2354-2358.

3. The siRNA molecule according to claim 1 or 2, wherein the antisense strand comprises a nucleotide sequence of any one of SEQ ID NOs: 453-902, 1485-2066, 2108-2147, 2188-2227, 2253-2277, 2302-2325 or 2340-2353.

4. A double-stranded short interfering RNA (siRNA) molecule comprising:
(a) a sense strand comprising a nucleotide sequence of any one of SEQ ID NOs: 3-452, 903-1484, 2068-2107, 2148-2187, 2228-2252, 2278-2301, 2326-2339 or 2354-2358 and/or
(b) an antisense strand comprising a nucleotide sequence of any one of SEQ ID NOs: 453-902, 1485-2066, 2108-2147, 2188-2227, 2253-2277, 2302-2325 or 2340-2353,
wherein the siRNA molecule downregulates expression of a Patatin-like phospholipase domain-containing protein 3 (PNPLA3) gene.

5. The siRNA molecule according to claim 4, wherein the sense strand and/or the antisense strand comprises at least one modified nucleotide.

6. The siRNA molecule according to claim 4 or 5, wherein the sense strand and/or the antisense strand comprises at least one modification selected from the group consisting of a modification to a ribose sugar, a modification to a nucleobase, and a modification to a phosphodiester backbone.

7. The siRNA molecule according to claim 4, 5, or 6, wherein the sense strand and/or the antisense strand comprises at least one modified nucleotide selected from the group consisting of 2′-O-methyl, a 2′-fluoro, a locked nucleic acid, a nucleoside analog, a 5′ terminal vinyl phosphonate, and a 5′ phosphorothioate internucleoside linkage.

8. The siRNA molecule according to any one of claims 1-7, wherein the sense strand comprises a nucleotide sequence of any one of SEQ ID NOs: 903-1484, 2148-2187, 2278-2301, 2326-2339 or 2354-2358.

9. The siRNA molecule according to any one of claims 1-8, wherein the antisense strand comprises a nucleotide sequence of any one of SEQ ID NOs: 1485-2066, 2188-2227, 2302-2325 or 2340-2353.

10. The siRNA molecule according to any one of claims 1-9, wherein at least one end of the siRNA molecule is a blunt end.

11. The siRNA molecule according to any one of claims 1-10, wherein at least one end of the siRNA molecule comprises an overhang, wherein the overhang comprises at least one nucleotide.

12. The siRNA molecule according to any one of claims 1-7 and 10, wherein both ends of the siRNA molecule comprise an overhang, wherein the overhang comprises at least one nucleotide.

13. The siRNA molecule according to any one of claims 1-12, wherein the siRNA molecule is selected from any one of siRNA Duplex ID Nos. D1-D515 or MD1-MD687.

14. The siRNA molecule according to any one of claims 1-13, wherein the PNPLA3 gene comprises a nucleotide sequence that is at least about 80%, 85%, 90%, 91%, 92%, 93%, 94%, 95%, 96%, 97%, 98%, 99%, or 100% identical to the nucleotide sequence of SEQ ID NO: 1 across the full-length of SEQ ID NO: 1.

15. The siRNA molecule according to any one of claims 1-14, wherein the PNPLA3 gene comprises a nucleotide sequence having less than or equal to 1, 2, 3, 4, 5, 6, 7, 8, 9, 10, 11, 12, 13, 14, 15, 16, 17, 18, 19, or 20 nucleotide mismatches to the nucleotide sequence of SEQ ID NO: 1 across the full-length of SEQ ID NO: 1.

16. The siRNA molecule according to any one of claims 1-15, wherein the PNPLA3 gene comprises a nucleotide sequence having a single nucleotide missense mutation at position 444 of the nucleotide sequence of SEQ ID NO: 1.

17. The siRNA molecule according to any one of claims 1-16, wherein the PNPLA3 gene comprises a nucleotide sequence encoding a PNPLA3 protein having an amino acid sequence that is at least about 80%, 85%, 90%, 91%, 92%, 93%, 94%, 95%, 96%, 97%, 98%, 99%, or 100% identical to the amino acid sequence of SEQ ID NO: 2 across the full-length of SEQ ID NO: 2.

18. The siRNA molecule according to any one of claims 1-17, wherein the PNPLA3 gene comprises a nucleotide sequence encoding a PNPLA3 protein having an amino acid sequence having less than or equal to 1, 2, 3, 4, 5, 6, 7, 8, 9, 10, 11, 12, 13, 14, 15, 16, 17, 18, 19, or 20 substitutions, deletions, or insertions to the amino acid sequence of SEQ ID NO: 2 across the full-length of SEQ ID NO: 2.

19. The siRNA molecule according to any one of claims 1-18, wherein the PNPLA3 gene comprises a nucleotide sequence encoding a PNPLA3 protein having an amino acid sequence having a substitution at position 148 of the amino acid sequence of SEQ ID NO: 2.

20. The siRNA molecule of claim 19, wherein the substitution at position 148 is an I148M substitution.

21. The siRNA molecule of claim 16, wherein the nucleotide at position 444 of SEQ ID NO: 1 contains a C to G substitution.

22. The siRNA molecule of claim 21, wherein the antisense strand is complementary to a fragment of the PNPLA3 gene containing a C to G substitution at position 444 of SEQ ID NO: 1.

23. A pharmaceutical composition comprising the siRNA molecule according to any one of claims 1-22.

24. A pharmaceutical composition comprising 2, 3, 4, 5, 6, 7, 8, 9, 10 or more siRNA molecules according to any one of claims 1-22.

25. The pharmaceutical composition according to claim 23 or 24, further comprising at least one additional active agent, wherein the at least one additional active agent is a liver disease treatment agent.

26. The pharmaceutical composition of claim 25, wherein the liver disease treatment agent is selected from a peroxisome proliferator-activator receptor (PPAR) agonist, farnesoid X receptor (FXR) agonist, lipid-altering agent, incretin-based therapy, and thyroid hormone receptor (THR) modulator.

27. The pharmaceutical composition of claim 26, wherein the PPAR agonist is selected from a PPARα agonist, dual PPARα/δ agonist, PPARγ agonist, and dual PPARα/γ agonist.

28. The pharmaceutical composition of claim 27, wherein the dual PPARα agonist is a fibrate.

29. The pharmaceutical composition of claim 27, wherein the PPARα/δ agonist is elafibranor.

30. The pharmaceutical composition of claim 27, wherein the PPARγ agonist is a thiazolidinedione (TZD).

31. The pharmaceutical composition of claim 30, wherein the TZD is pioglitazone.

32. The pharmaceutical composition of claim 27, wherein the dual PPARα/γ agonist is saroglitazar.

33. The pharmaceutical composition of claim 26, wherein the FXR agonist is selected from obeticholic acis (OCA) and TERN-101.

34. The pharmaceutical composition of claim 26, wherein the lipid-altering agent is aramchol.

35. The pharmaceutical composition of claim 26, wherein the incretin-based therapy is a glucagon-like peptide 1 (GLP-1) receptor agonist or dipeptidyl peptidase 4 (DPP-4) inhibitor.

36. The pharmaceutical composition of claim 35, wherein the GLP-1 receptor agonist is exenatide or liraglutide.

37. The pharmaceutical composition of claim 35, wherein the DPP-4 inhibitor is sitagliptin or vildapliptin.

38. The pharmaceutical composition of claim 26, wherein the THR modulator is selected from a THR-beta modulator and thyroid hormone analogue.

39. The pharmaceutical composition of claim 38, wherein the THR-beta modulator is a THR-beta agonist.

40. The pharmaceutical composition of claim 39, wherein the THR-beta agonist is selected from is selected from KB141, sobetirome, Sob-AM2, eprotirome, VK2809, resmetirom, MB07344, IS25, TG68, and GC-24.

41. The pharmaceutical composition of claim 38, wherein the thyroid hormone analogue is selected from L-94901 and CG-23425.

42. A method of treating a liver disease in a subject in need thereof, comprising administering to the subject an amount of the siRNA molecule according to any one of claims 1-22.

43. A method of treating a liver disease in a subject in need thereof, comprising administering to the subject an amount of the pharmaceutical composition according to any one of claims 23-41.

44. The method of claim 42 or 43, wherein the liver disease is a nonalcoholic fatty liver disease (NAFLD).

45. The method of claim 42 or 43, wherein the liver disease is nonalcoholic steatohepatitis (NASH).

46. The method according to any of claims 42-45, further comprising administering to the subject at least one additional active agent, wherein the at least one additional active agent is a liver disease treatment agent.

47. The method of claim 46, wherein the liver disease treatment agent is selected from a peroxisome proliferator-activator receptor (PPAR) agonist, farnesoid X receptor (FXR) agonist, lipid-altering agent, incretin-based therapy, and thyroid hormone receptor (THR) modulator.

48. The method of claim 47, wherein the PPAR agonist is selected from a PPARα agonist, dual PPARα/δ agonist, PPARγ agonist, and dual PPARα/γ agonist.

49. The method of claim 48, wherein the dual PPARα agonist is a fibrate.

50. The method of claim 48, wherein the PPARα/δ agonist is elafibranor.

51. The method of claim 48, wherein the PPARγ agonist is a thiazolidinedione (TZD).

52. The method of claim 51, wherein the TZD is pioglitazone.

53. The method of claim 48, wherein the dual PPARα/γ agonist is saroglitazar.

54. The method of claim 47, wherein the FXR agonist is selected from obeticholic acis (OCA) and TERN-101.

55. The method of claim 47, wherein the lipid-altering agent is aramchol.

56. The method of claim 47, wherein the incretin-based therapy is a glucagon-like peptide 1 (GLP-1) receptor agonist or dipeptidyl peptidase 4 (DPP-4) inhibitor.

57. The method of claim 56, wherein the GLP-1 receptor agonist is exenatide or liraglutide.

58. The method of claim 56, wherein the DPP-4 inhibitor is sitagliptin or vildapliptin.

59. The method of claim 47, wherein the THR modulator is selected from a THR-beta modulator and thyroid hormone analogue.

60. The method of claim 59, wherein the THR-beta modulator is a THR-beta agonist.

61. The method of claim 60, wherein the THR-beta agonist is selected from is selected from KB141, sobetirome, Sob-AM2, eprotirome, VK2809, resmetirom, MB07344, IS25, TG68, and GC-24.

62. The method of claim 59, wherein the thyroid hormone analogue is selected from L-94901 and CG-23425.

63. The method of any one of claims 46-62, wherein the siRNA molecule and the liver disease treatment agent are administered concurrently.

64. The method of any one of claims 46-62, wherein the siRNA molecule and the liver disease treatment agent are administered sequentially.

65. The method of any one of claims 46-62, wherein the siRNA molecule is administered prior to administering the liver disease treatment agent.

66. The method of any one of claims 46-62, wherein the siRNA molecule is administered after administering the liver disease treatment agent.

67. The method of any of one claims 42-66, wherein the siRNA molecule is administered at a dose of at least 1 mg/kg, 2 mg/kg, 3 mg/kg, 4 mg/kg, 5 mg/kg, 6 mg/kg, 7 mg/kg, 8 mg/kg, 9 mg/kg, 10 mg/kg, 11 mg/kg, 12 mg/kg, 13 mg/kg 14 mg/kg, or 15 mg/kg.

68. The method of any of one claims 42-66, wherein the siRNA molecule is administered at a dose of between 0.5 mg/kg to 50 mg/kg, 0.5 mg/kg to 40 mg/kg 0.5 mg/kg to 30 mg/kg, 1 mg/kg to 50 mg/kg, 1 mg/kg to 40 mg/kg, 1 mg/kg to 30 mg/kg, 1 mg/kg to 20 mg/kg, 3 mg/kg to 50 mg/kg, 3 mg/kg to 40 mg/kg, 3 mg/kg to 30 mg/kg, 3 mg/kg to 20 mg/kg, 3 mg/kg to 15 mg/kg, 3 mg/kg to 10 mg/kg, 4 mg/kg to 50 mg/kg, 4 mg/kg to 40 mg/kg, 4 mg/kg to 30 mg/kg, 4 mg/kg to 20 mg/kg, 4 mg/kg to 15 mg/kg, 4 mg/kg to 10 mg/kg, 5 mg/kg to 50 mg/kg, 5 mg/kg to 40 mg/kg, 5 mg/kg to 30 mg/kg, 5 mg/kg to 20 mg/kg, 5 mg/kg to 15 mg/kg, or 5 mg/kg to 10 mg/kg.

69. The method of any of one claims 42-66, wherein the siRNA molecule is administered at least 1, 2, 3, 4, 5, 6, 7, 8, 9, or 10 times.

70. The method of any of one claims 42-66, wherein the siRNA molecule is administered at least 1, 2, 3, 4, 5, 6, 7, 8, 9, or 10 times a day, at least 1, 2, 3, 4, 5, 6, 7, 8, 9, or 10 times a week, or at least 1, 2, 3, 4, 5, 6, 7, 8, 9, or 10 times a month.

71. The method of any of one claims 42-70, wherein the siRNA molecule are administered at least once every 1, 2, 3, 4, 5, 6, 7, 8, 9, 10, 11, 12, 13, 14, 15, 16, 17, 18, 19, 20, or 21 days.

72. The method of any of one claims 42-71, wherein the siRNA molecule for a period of at least 1, 2, 3, 4, 5, 6, 7, 8, 9, 10, 11, 12, 13, 14, 15, 16, 17, 18, 19, 20, or 21 days, or at least 1, 2, 3, 4, 5, 6, 7, 8, 9, 10, 11, 12, 13, 14, 15, 16, 17, 18, 19, 20, 21, 22, 23, 24, 25, 26, 27, 28, 29, 30, 35, 40, 45, 50, 51, 52, 53, 54, or 55 weeks.

73. The method of any of one claims 42-72, wherein the siRNA molecule is administered at a single dose of 5 mg/kg.

74. The method of any of one claims 42-72, wherein the siRNA molecule is administered at a single dose of 10 mg/kg.

75. The method of any of one claims 42-72, wherein the siRNA molecule is administered in three doses of 10 mg/kg once a week.

76. The method of any of one claims 42-72, wherein the siRNA molecule is administered in three doses of 10 mg/kg once every three days.

77. The method of any of one claims 42-72, wherein the siRNA molecule is administered in five doses of 10 mg/kg once every three days.

78. The method of any of one claims 42-72, wherein the siRNA molecule is administered in six doses of ranging from 1 mg/kg to 15 mg/kg, 1 mg/kg to 10 mg/kg, 2 mg/kg to 15 mg/kg, 2 mg/kg to 10 mg/kg, 3 mg/kg to 15 mg/kg, or 3 mg/kg to 10 mg/kg.

79. The method of claim 78, wherein the first dose and second dose are administered at least 3 days apart.

80. The method of claim 78 or 79, wherein the second dose and third dose are administered at least 4 days apart.

81. The method of any one of claims 78-80, wherein the third dose and fourth dose, fourth dose and fifth dose, or fifth dose and sixth dose are administered at least 7 days apart.

82. The method according to any one of claims 42-81, wherein the siRNA molecule or the pharmaceutical composition is administered intravenously or subcutaneously.

83. Use of the siRNA molecule according to any one of claims 1-22 or the pharmaceutical composition according to any one of claims 23-41 in the manufacture of a medicament for treating a liver disease.

84. The use of claim 83, wherein the liver disease is a nonalcoholic fatty liver disease (NAFLD).

85. The use of claim 83, wherein the liver disease is nonalcoholic steatohepatitis (NASH).

86. The use of claim 83, 84, or 85, further comprising at least one additional active agent in the manufacture of the medicament, wherein the at least one additional active agent is a liver disease treatment agent.

87. The use of claim 86, wherein the liver disease treatment agent is selected from a peroxisome proliferator-activator receptor (PPAR) agonist, farnesoid X receptor (FXR) agonist, lipid-altering agent, incretin-based therapy, and thyroid hormone receptor (THR) modulator.

88. The use of claim 91, wherein the PPAR agonist is selected from a PPARα agonist, dual PPARα/δ agonist, PPARγ agonist, and dual PPARα/γ agonist.

89. The use of claim 92, wherein the dual PPARα agonist is a fibrate.

90. The use of claim 92, wherein the PPARα/δ agonist is elafibranor.

91. The use of claim 92, wherein the PPARγ agonist is a thiazolidinedione (TZD).

92. The use of claim 95, wherein the TZD is pioglitazone.

93. The use of claim 92, wherein the dual PPARα/γ agonist is saroglitazar.

94. The use of claim 91, wherein the FXR agonist is obeticholic acis (OCA).

95. The use of claim 91, wherein the lipid-altering agent is aramchol.

96. The use of claim 91, wherein the incretin-based therapy is a glucagon-like peptide 1 (GLP-1) receptor agonist or dipeptidyl peptidase 4 (DPP-4) inhibitor.

97. The use of claim 100, wherein the GLP-1 receptor agonist is exenatide or liraglutide.

98. The use of claim 100, wherein the DPP-4 inhibitor is sitagliptin or vildapliptin.

99. The use of claim 87, wherein the THR modulator is selected from a THR-beta modulator and thyroid hormone analogue.

100. The method of claim 99, wherein the THR-beta modulator is a THR-beta agonist.

101. The method of claim 100, wherein the THR-beta agonist is selected from is selected from KB141, sobetirome, Sob-AM2, eprotirome, VK2809, resmetirom, MB07344, IS25, TG68, and GC-24.

102. The method of claim 99, wherein the thyroid hormone analogue is selected from L-94901 and CG-23425.

103. The siRNA molecule according to any one of claims 1-22 for use as a medicament.

104. The pharmaceutical composition according to any one of claims 23-41 for use as a medicament.

105. The siRNA molecule according to any one of claims 1-22 for use in the treatment of a liver disease.

106. The siRNA molecule of claim 105, wherein the liver disease is a nonalcoholic fatty liver disease (NAFLD).

107. The siRNA molecule of claim 105, wherein the liver disease is nonalcoholic steatohepatitis (NASH).

108. The pharmaceutical composition according to any one of claims 23-41, for use in the treatment of a liver disease.

109. The pharmaceutical composition of claim 108, wherein the liver disease is a nonalcoholic fatty liver disease (NAFLD).

110. The pharmaceutical composition of claim 108, wherein the liver disease is nonalcoholic steatohepatitis (NASH).

111. A method of reducing the expression level of PNPLA3 in a subject in need thereof comprising administering to the subject an amount of the siRNA molecule according to any one of claims 1-22 or the pharmaceutical composition according to any one of claims 23-41, thereby reducing the expression level of PNPLA3 in the subject.

112. A method of preventing at least one symptom of a liver disease in a subject in need thereof comprising administering to the subject an amount of the siRNA molecule according to any one of claims 1-21 or the pharmaceutical composition according to any one of claims 23-41, thereby preventing at least one symptom of a liver disease in the subject.

113. The siRNA molecule according to any one of claims 1-22, further comprising a ligand.

114. The siRNA molecule according to claim 113, wherein the ligand comprises at least one GalNAc derivative.

115. The siRNA molecule according to claim 113 or 114, wherein the ligand is [chemical structure]
